(19) United States
(12) Patent Application Publication
(10) Pub. No.: US 2009/0169520 A1
(43) Pub. Date: Jul. 2, 2009

(54) Compounds, Pharmaceutical Compositions and Therapeutic Methods of Preventing and Treating Diseases and Disorders Associated With Amyloid Fibril Formation

(75) Inventors: Hermona Soreq, Jerusalem (IL); Sophie Diamant, Mevasseret Zion (IL)

Correspondence Address: MARTIN D. MOYNIHAN d/b/a PRTSI, INC., P.O. BOX 16446, ARLINGTON, VA, 22215, US

(73) Assignee: YISSUM RESEARCH DEVELOPMENT COMPANY OF THE HEBREW UNIVERSITY OF JERUSALEM, Jerusalem (IL)

(21) Appl. No.: 10/585,695

(22) PCT Filed: Jan. 9, 2005
(86) PCT No.: PCT/IL2005/000028

§ 371 Date: Aug. 20, 2008

(51) Int. Cl. A61K 35/12; C07K 14/00; A61K 38/16; A61K 31/7088

(52) U.S. Cl. 424/93.7; 530/324; 514/12; 436/501; 514/44

(57) ABSTRACT

Compounds, pharmaceutical compositions and methods for prevention and/or reversal of amyloid fibril formation and treating amyloid-related disorders are provided. Also provided a method of limiting and/or reducing inflammation.

### FIELD AND BACKGROUND OF THE INVENTION

[0001] The present invention relates to compounds, pharmaceutical compositions and therapeutic methods of preventing and/or inhibiting fibril formation and more particularly to methods of preventing and/or treating amyloid—related diseases and disorders. The present invention further relates to methods of treating inflammations.

[0002] Proper protein folding is a crucial step required for normal functioning and turnover of proteins. However, various factors such as stress, specific genetic mutations and certain infections may induce a cascade of yet incompletely understood processes leading to conformational changes or misfolding of proteins and consequently to their abnormal accumulation as amyloid fibrils. Such conformational changes often involve the conversion from an α-helix configuration to a β-pleated sheet structure. These structural rearrangements, followed by nucleation, polymerization, aggregation and fibril formation, play a central role in the pathogenesis of most neurodegenerative diseases, such as Alzheimer's, Huntington's, Parkinson's and prion diseases, as well as at least eight of the polyglutamine—related disorders [Kaytor, M. D. and Warren, S. T. (1999) J. Biol. Chem. 274(53): 37507-10] and various amyloidosis syndromes (e.g., Multiple myeloma, Chronic inflammatory disease, Rheumatoid arthritis, Tuberculosis, Skin and lung abscesses, Cancer, Hodgkin's disease, Hemodialysis for CRF, Heredofamilial amyloidosis, Familial Mediterranean Fever and Familial amyloid polyneuropathy).

[0003] For example, Alzheimer's disease (AD) is characterized by the formation and progressive deposition of insoluble amyloid fibrils within the cerebral cortex. The key constituent of these amyloid deposits has been identified as a 39-43-amino acid long polypeptide, the β-amyloid peptide (AD). Once deposited as dense amyloid plaque cores, the peptide becomes highly resistant to further proteolysis and causes dystrophy of the surrounding nerve cells [Knauer et al. (1992) Proc. Natl. Acad. Sci. U.S.A. 89(16): 7437-41; Nordstedt et al. (1994) J. Biol. Chem. 269(49): 30773-6]. However, it is still unclear whether the amyloid fibrils themselves or the soluble oligomers of Aβ are the main neurotoxic species that contribute to neurodegeneration and dementia present in Alzheimer's disease or other amyloidosis—related disorders (De Felice F G, et al., 2004, FASEB J. 18: 1366-72).

[0004] Several studies aiming at identifying therapeutic approaches for preventing amyloid fibril formation have suggested the use of beta-sheet breaker such as N,N′-bis(3-hydroxyphenyl)pyridazine-3,6-diamine (RS-0406) to reverse amyloid beta-induced cytotoxicity (Nakagami Y, et al., 2002, Br. J. Pharmacol. 137: 676-82), the use of N-methylated derivatives to inhibit toxicity and protofibril formation in the amyloid-beta peptide beta(25-35) (Doig A J, et al., 2002, Biochem. Soc. Trans. 30(4): 537-42), the mechanical unzipping of amyloid beta-fibrils (Kellermayer M S, et al., 2004, J. Biol. Chem. Epub ahead of print), the use of curcumin as an anti-inflammatory agent which suppresses amyloid accumulation (Yang F et al., 2004, J. Biol. Chem. December 7; Epub ahead of print), the use of a monoclonal antibody specific to the C-terminal 92-99 of beta(2)ₘ (Motomiya Y, et al., 2005, Kidney Int. 67: 314-20) and the use of nonsteroidal anti-inflammatory drugs (NSAIDs) to stabilize Transthyretin (TTR) tetramers (Miller S R, et al., 2004, Lab Invest. 84: 545-52).

[0005] Butyrylcholinesterase (BChE, EC 3.1.1.8) is the primary circulating cholinesterase, abundant in serum and present at synapses and neuromuscular junctions, where it binds the same structural unit as the synaptic variant of acetylcholinesterase (AChE), AChE-S, with which it shares C-terminal sequence homology. Like ACHE, BChE is capable of hydrolyzing acetylcholine (ACh) at the end of each round of pre-synaptic secretion. However, while ACHE has a narrow substrate specificity, BChE exhibits a wide specificity for both substrates and inhibitors.

[0006] Prior studies have shown that acetylcholinesterase (ACHE) co-localizes with the Aβ peptides present in the brain of Alzheimer's patients [Inestrosa, N. C. et al. (1996a) Mol. Psychiatry. 1(5): 359-61; Inestrosa, N. C. et al. (1996b) Neuron 16(4): 881-91;] and that amyloid P complexes including ACHE are far more neurotoxic than Aβ aggregates alone [Alvarez et al. (1998) J. Neurosci. 18(9):3213-23]. Moreover, AChE, but not BChE, was found to promote aggregation of amyloid complexes [Inestrosa, 1996b (Supra)].

[0007] Despite advances in the field, there is still a great need to identify a suitable therapeutic agent for preventing amyloid fibril formation.

### SUMMARY OF THE INVENTION

[0008] While reducing the present invention to practice, the present inventors have uncovered that BChE and more so BChE derived peptides are capable of preventing and/or reversing amyloid fibril formation and thus can be used to prevent and/or treat amyloidosis—related disorders and diseases. It was further found that BChE can prevent or reduce inflammation.

[0009] According to one aspect of the present invention there is provided a method of identifying a BChE derived peptide capable of preventing and/or reversing amyloid fibril formation comprising contacting the BChE derived peptide with an amyloid precursor protein and a β-sheet—responsive dye and measuring a fluorescence intensity resulting from the β-sheet—responsive dye prior to and following the contacting the BChE derived peptide with the amyloid precursor protein, wherein delayed or reduced increase in the fluorescence intensity following the contacting the BChE derived peptide with the amyloid precursor protein is indicative of an ability of the peptide to prevent amyloid fibril formation. This is a high throughput method which is readily automateable and which can be used to test, for example, within a short time period each one of the peptides represented by SEQ ID NOs:8-20302, all are BChE derived peptides.

[0010] According to further features in preferred embodiments of the invention described below, the β-sheet—responsive dye is a benzothiazole dye.

[0011] According to still further features in the described preferred embodiments the β-sheet—responsive dye is Thioflavin T.

[0012] According to still further features in the described preferred embodiments the Thioflavin T is provided at a concentration range of 0.5-1.5 μM.

[0013] According to still further features in the described preferred embodiments the Thioflavin T is provided at a concentration of about 1 μM. As used herein throughout the term “about” refers to ±10%.

[0014] According to still further features in the described preferred embodiments the amyloid precursor protein is selected from the group consisting of Transthyretin, Amyloid beta protein, Amyloid beta (1-40), Procalcitonin, IAPP (Amylin), amyloid light chain (AL), non-immunoglobulin amyloid associated (AA), non-immunoglobulin amyloid associated serum precursor (SAA), α-synucleic protein, ataxin and huntingtin.

[0015] According to still further features in the described preferred embodiments the Amyloid beta (1-40) is provided at a concentration in the range of 20-50 μM.

[0016] According to still further features in the described preferred embodiments the Amyloid beta (1-40) is provided at a concentration of about 33 μM.

[0017] The method described above can be used to identify and point out BChE derived peptides capable of preventing and/or reversing amyloid fibril formation.

[0018] Hence, according to another aspect of the present invention there is provided a BChE derived peptide capable of preventing and/or reversing amyloid fibril formation. In presently preferred embodiments, the BChE derived peptide is selected from the group consisting of SEQ ID NOs:1 and 8-20302.

[0019] According to yet another aspect of the present invention there is provided a pharmaceutical composition comprising as an active ingredient BChE or a BChE derived peptide, the peptide being capable of preventing and/or reversing amyloid fibril formation and a pharmaceutically acceptable carrier.

[0020] According to yet another aspect of the present invention there is provided a method of treating an individual having or being predisposed to a disease or disorder associated with amyloid fibril formation, the method comprising administering to the individual a therapeutically effective amount of BChE or BChE derived peptide, thereby treating the individual having or being predisposed to a disease or disorder associated with amyloid fibril formation.

[0021] According to further features in the described preferred embodiments of the invention described below, the BChE derived peptide is selected from the group consisting of SEQ ID NO:1 and 8-20302.

[0022] According to still further features in the described preferred embodiments the disease or disorder associated with amyloid fibril formation is selected from the group consisting of a neurodegenerative disease, a disorder associated with systemic amyloidosis, a disorder associated with localized amyloidosis, a prion disease and/or a polyglutamine disorder.

[0023] According to still further features in the described preferred embodiments the neurodegenerative disease is selected from the group consisting of Alzheimer's disease, Huntington's disease and Parkinson's disease.

[0024] According to still further features in the described preferred embodiments the disorder associated with systemic amyloidosis is selected from the group consisting of Multiple myeloma, Chronic inflammatory disease, Rheumatoid arthritis, Tuberculosis, Skin abscess, lung abscess, Cancer, Hodgkin's disease, Hemodialysis for chronic renal failure, Heredofamilial amyloidosis, Familial Mediterranean Fever and Familial amyloid polyneuropathy.

[0025] According to still further features in the described preferred embodiments the disorder associated with localized amyloidosis is selected from the group consisting of Senile cardiac amyloidosis, Senile cerebral amyloidosis, Endocrine tumors, Medullary carcinoma of thyroid, Type II diabetes and Pancreatic islets β-cells.

[0026] According to still further features in the described preferred embodiments the prion disease is selected from the group consisting of Creutzfeldt-Jakob disease (CJD), spongioform enchephalopathies (TSE's), mad cow disease, Gerstmann-Straussler-Scheinker disease (GSS) and Kuru.

[0027] According to still further features in the described preferred embodiments the polyglutamine disorder is selected from the group consisting of Huntington's disease (HD), Spinal and Bulbar Muscular Atrophy (SBMA), DentatoRubral and PallidoLuysian Atrophy (DRPLA), spinocerebellar ataxia type 1 (SCA1), spinocerebellar ataxia type 2 (SCA2), Spinocerebellar ataxia type-3 (SCA3; Machado-Joseph Disease), Spinocerebellar ataxia type 7 (SCA7) and Spinocerebellar ataxia type 17 (SCA17).

[0028] According to still further features in the described preferred embodiments the amyloid is a protein selected from the group consisting of Transthyretin, Amyloid beta protein, Procalcitonin, IAPP (Amylin), amyloid light chain (AL), non-immunoglobulin amyloid associated (AA), non-immunoglobulin amyloid associated serum precursor (SAA), α-synucleic protein, ataxin and huntingtin.

[0029] According to still further features in the described preferred embodiments the active ingredient is formulated in a therapeutically effective amount providable at a dose range of 0.1-1000 micromol per kg body weight.

[0030] According to still further features in the described preferred embodiments the active ingredient is formulated in a therapeutically effective amount providable at a dose range of 1-100 micromol per kg body weight.

[0031] According to still further features in the described preferred embodiments the active ingredient is formulated in a therapeutically effective amount providable at a dose range of 5-50 micromol per kg body weight.

[0032] According to still another aspect of the present invention there is provided a method of preventing and/or reversing amyloid fibril formation in a tissue of an individual comprising increasing a level of BChE or a BChE derived peptide being capable of preventing and/or reversing amyloid fibril formation in the tissue, thereby preventing and/or reversing amyloid fibril formation therein.

[0033] According to yet another aspect of the present invention there is provided a method of treating an individual having or being predisposed to a disease or disorder associated with amyloid fibril formation, the method comprising increasing a level of BChE or a BChE derived peptide in a tissue susceptible to the amyloid fibril formation of the individual, thereby treating the individual having or being predisposed to a disorder associated with amyloid fibril formation.

[0034] According to further features in preferred embodiments of the invention described below, increasing a level of BChE or a BChE derived peptide being capable of preventing and/or reversing amyloid fibril formation in the tissue is effected by at least one approach selected from the group consisting of (a) expressing in cells of the individual an exogenous polynucleotide encoding the BChE or the BChE derived peptide; (b) increasing expression of endogenous BChE in the individual; (c) increasing endogenous BChE activity in the individual; (d) administering BChE or the BCHE derived peptide to the individual; and (e) administering to the individual cells expressing the BChE or the BChE derived peptide.

[0035] According to still further features in the described preferred embodiments of the invention further described below, the BChE is as set forth in SEQ ID NO:2.

[0036] According to still further features in the described preferred embodiments the exogenous polynucleotide encoding the BChE or the BChE derived peptide is derived from SEQ ID NO:7.

[0037] According to an additional aspect of the present invention there is provided a method of limiting or reducing an inflammatory reaction in an individual, comprising increasing an expression level and/or activity of BChE in the individual, thereby limiting or reducing the inflammatory reaction in the individual.

[0038] According to still further features in the described preferred embodiments of the invention further described below, the inflammatory reaction is mediated by circulating acetylcholine.

[0039] According to still further features in the described preferred embodiments, the individual is subjected to a surgery, stress or a trauma.

[0040] According to still further features in the described preferred embodiments the inflammatory reaction is mediated by at least one pro-inflammatory cytokine selected from the group consisting of IL-1, IL-1α, IL-1β, IL-1ss, IL-6, IL-8, IL-10, IL-12, IL-18 and TNFα.

[0041] According to still further features in the described preferred embodiments increasing an expression level and/or activity of BChE in the individual is effected by at least one approach selected from the group consisting of (a) expressing in cells of the individual an exogenous polynucleotide encoding at least a functional portion of BChE; (b) increasing expression of endogenous BChE in the individual; (c) increasing endogenous BChE activity in the individual; (d) administering an exogenous polypeptide including at least a functional portion of BChE to the individual; and (e) administering cells expressing BChE into the individual.

[0042] The present invention successfully addresses the shortcomings of the presently known configurations by providing novel compounds, compositions a method of preventing and/or reversing amyloid fibril formation.

[0043] Unless otherwise defined, all technical and scientific terms used herein have the same meaning as commonly understood by one of ordinary skill in the art to which this invention belongs. Although methods and materials similar or equivalent to those described herein can be used in the practice or testing of the present invention, suitable methods and materials are described below. In case of conflict, the patent specification, including definitions, will control. In addition, the materials, methods and examples are illustrative only and not intended to be limiting.

### BRIEF DESCRIPTION OF THE DRAWINGS

[0044] The invention is herein described, by way of example only, with reference to the accompanying drawings. With specific reference now to the drawings in detail, it is stressed that the particulars shown are by way of example and for purposes of illustrative discussion of the preferred embodiments of the present invention only and are presented in the cause of providing what is believed to be the most useful and readily understood description of the principles and conceptual aspects of the invention. In this regard, no attempt is made to show structural details of the invention in more detail than is necessary for a fundamental understanding of the invention, the description taken with the drawings making apparent to those skilled in the art how the several forms of the invention may be embodied in practice.

[0045] In the drawings:

[0046] FIGS. 1a-e are graphs depicting the effects of BChE and ACHE on amyloid fibril formation. Aβ [1-40], at a final concentration of 33 μM, was incubated at 30° C. with shaking, in the presence of 1 μM Thioflavin T (ThT). The kinetics of change in ThT fluorescence was followed with time. Where indicated, the incubation solution contained BChE (FIG. 1a) and/or ACHE-S (FIG. 1b) or both enzymes at the noted micromolar concentrations and at the constant ratio of 1:100 ACHE or BChE to Aβ (FIGS. 1c-d). Shown are representative findings from a series of 12-16 experiments in each case. Note that while BChE suppresses amyloid formation, ACHE accelerates such fibrillation. Also note the longer time scale prior to the onset of detectable fibrillation for BChE as compared with ACHE. FIG. 1e-a graph depicting the effect of AChE on amyloid formation. Note that increasing the doses of AChE results in increased fibril yields and decreased lag period until fibril formation initiates.∥

[0047] FIGS. 2a-b depict the overall effect of BChE on amyloid formation. FIG. 2a is a histogram showing the rate of amyloid formation in the presence or absence of ACHE and/or BChE. Note the significant effect of BChE in reducing the rate of amyloid formation even in the presence of ACHE. FIG. 2b is a schematic illustration summarizing the inhibitory effect of BChE on amyloid fibril formation which counteracts the effect generated by ACHE.

[0048] FIGS. 3a-d depict the effect of the synthetic BSP and ASP peptides on amyloid formation. FIG. 3a illustrates the sequence and homology of the BSP41, ASP23, ASP40 and ASP63 peptides. Homologous residues between BSP41 and ASP40 are marked by asterisks, partial homologies are marked with dots. |FIG. 3b-a graph depicting the effect of BSP41 peptide on amyloid fibril formation. Aβ at 33 μM was incubated at 30° C. with 1 μM ThT and the noted micromolar concentrations of BSP41. Shown are the rates of fibril formation for each set of conditions. FIG. 3c—a histogram depicting the rate of amyloid formation (average rates ±SE) for the cumulative data of each protein and peptide tested, derived from the time curves of changes in ThT fluorescence. Note that BSP41, but not ASP23, ASP40, or ASP63 significantly attenuates fibril formation. FIG. 3d—a 3-D model depicting the globular structure of BChE. Note the large distance between the Peripheral Anionic binding Site (PAS) and the C-terminal domain (CT), both of which are highlighted in green.

[0049] FIG. 4 depicts the circular dichroism (CD) spectra of the BSP and ASP peptides. Shown are the circular dichroism (CD) spectra of 1·10⁻⁴ M BSP41 dissolved in HIFP and 1·10⁻⁴ M ASP40, ASP23 and ASP63 in aqueous solutions. Note the characteristic features of α-helix in BSP41, ASP40, or ASP63 as compared with the random coil seen in ASP23.

[0050] FIGS. 5a-e depict the comparative three-dimensional molecular modeling of BSP and ASP. FIGS. 5a-b depict the molecular modeling of BSP (FIG. 5a; purple) and ASP (FIG. 5b; sky blue). Note that both peptides are amphipathic helices, i.e.; each helix can be divided into a polar and non-polar side (as demonstrated by the yellow broken line). BSP's division into sharp two distinguished sides is imperfect, since it is disturbed by a tryptophan residue (shown in sticks and colored by element), while ASP's amphipathicity is intact, as shown by the arginine residue (also shown in sticks and colored by element) in the parallel position to the BSP tryptophan. FIGS. 5c-d depict cross-sections of the BSP (FIG. 5c) and ASP (FIG. 5d) helices. Residues were presented as circles (hydrophilic), diamonds (hydrophobic), triangles (potentially negatively charged), or pentagons (potentially positively charged). Hydrophobicity is color coded from green (the most hydrophobic residue) to yellow (zero hydrophobicity), with the green:yellow ratio decreasing proportionally. Hydrophilic residues are coded red (pure red being the most hydrophilic [uncharged] residue) to white, with red:white decreasing proportionally. Potentially charged residues are colored light blue. Note that division by polarity but not by charge or pH of these helices is the only feasible one, as is highlighted by the purple division line. FIG. 5e—is an alignment between the BSP and ASP sequences.|

[0051] FIG. 6 is a graph illustrating the effect of BChE in preventing amylin amyloid fibril formation. Amylin at a concentration of 20 μM was incubated with Thiofalvin T (at a concentration of 1 μM) and the formation of amyloid fibril was measured by following the Thiofalvin T fluorescence intensity [excitation (450 nm); emission (485 nm)] in the presence or absence of 0.24 μM BChE (purified from pooled human plasma). Note that the addition of BChE increases the lag time for amylin fibrillation from 30 minutes to 110 minutes.

### DESCRIPTION OF THE PREFERRED EMBODIMENTS

[0052] The present invention is of compounds, pharmaceutical compositions and therapeutic methods of preventing amyloid fibril formation and treating or preventing diseases or disorders associated therewith. More specifically the present invention is of BChE derived peptides, pharmaceutical compositions containing BChE and/or BChE derived peptides and therapeutic methods of using BChE and/or BChE derived peptides in prevention and/or treatment of diseases and disorders associated with amyloid fibril formation, such as, but not limited to, neurodegenerative diseases, prion diseases and polyglutamine disorders.

[0053] The principles and operation of the method of preventing and/or reversing amyloid fibril formation according to the present invention may be better understood with reference to the drawings and accompanying descriptions.

[0054] Before explaining at least one embodiment of the invention in detail, it is to be understood that the invention is not limited in its application to the details set forth in the following description or exemplified by the Examples. The invention is capable of other embodiments or of being practiced or carried out in various ways. Also, it is to be understood that the phraseology and terminology employed herein is for the purpose of description and should not be regarded as limiting.

[0055] Proper protein folding is crucial for normal protein function and turnover. However, in many cases (e.g., neurodegenerative diseases, prion diseases and polyglutamine disorders) specific proteins are subjected to conformational changes or misfolding which often involve the conversion from an α-helix configuration to a β-pleated sheet structure. Such conformational changes lead to the abnormal accumulation of the misfolded proteins in the form of amyloid fibrils and plaques. Formation of amyloid fibrils has been observed in neurodegenerative diseases (e.g., Alzheimer's disease, Parkinson's disease), polyglutamine diseases [Huntington's disease, Spino-Cerebellar Ataxia (SCA)] and prion diseases [e.g., Kuru, Creutzfeldt-Jakob disease (CJD) spongioform enchephalopathies (TSE's), mad cow disease, and Gerstmann-Straussler syndrome (GSS)].

[0056] Prior attempts to prevent amyloid fibril formation suggested the use of beta-sheet breaker such as N,N′-bis(3-hydroxyphenyl)pyridazine-3,6-diamine (RS-0406) to reverse amyloid beta-induced cytotoxicity (Nakagami Y, et al., 2002, Br. J. Pharmacol. 137: 676-82), the use of N-methylated derivatives to inhibit toxicity and protofibril formation in the amyloid-beta peptide beta (25-35) (Doig A J, et al., 2002, Biochem. Soc. Trans. 30(4): 537-42), the mechanical unzipping of amyloid beta-fibrils (Kellermayer M S, et al., 2004, J. Biol. Chem. Epub ahead of print), the use of curcumin as an anti-inflammatory agent which suppresses amyloid accumulation (Yang F et al., 2004, J. Biol. Chem. December 7; Epub ahead of print), the use of a monoclonal antibody specific to the C-terminal 92-99 of beta(2)ₘ (Motomiya Y, et al., 2005, Kidney Int. 67: 314-20) and the use of nonsteroidal anti-inflammatory drugs (NSAIDs) to stabilize Transthyretin (TTR) tetramers (Miller S R, et al., 2004, Lab Invest. 84: 545-52).

[0057] While reducing the present invention to practice, the present inventors have uncovered that BChE and more so BChE derived peptides are capable of preventing and/or reversing amyloid fibril formation and thus can be used to prevent and/or treat amyloidosis—related disorders and diseases. It was further found that BChE can prevent or reduce inflammation.

[0058] As used herein the phrase “preventing and/or reversing amyloid fibril formation” refers to inhibiting the formation of, avoiding the formation of, delaying the formation of and/or limiting the extent of the formation of amyloid fibrils, as well as, disforming, reducing the level of and/or eliminating preformed amyloid fibrils.

[0059] As is shown in FIGS. 1-3 and Table 7 and as is described in Example 1 of the Examples section which follows, the BChE enzyme (SEQ ID NO:2), at a concentration of 30 μg/ml, as well as the synthetic BSP41 peptide (SEQ ID NO:1, amino acids 562-602 of Human BChE which is the C-terminal region of Human BChE), which mimics the C-terminus of human BChE, at a concentration of 2 μg/ml, were capable of completely attenuating Aβ fibrillation following 400 minutes of incubation as determined by change of Thioflavin T (ThT) fluorescence. These results indicate that BChE and BChE derived peptides can be used to prevent the formation of and/or dis-stabilize amyloid fibrils.

[0060] As used herein the term “BChE” refers to Butyrylcholinesterase, which is also known as Acylcholine acylhydrolase, Choline esterase II, Butyrylcholine esterase and/or Pseudocholinesterase. Butyrylcholinesterase (BCHE, EC 3.1.1.8) is the primary circulating cholinesterase, abundant in serum and present at synapses and neuromuscular junctions. BChE is capable of hydrolyzing acetylcholine (ACh) at the end of each round of pre-synaptic secretion and exhibits a wide specificity for both substrates and inhibitors.

[0061] Hence, according to one aspect of the present invention there is provided a method (assay) of identifying a BChE derived peptide capable of preventing and/or reversing amyloid fibril formation. The method according to this aspect of the invention comprises contacting the BChE derived peptide with an amyloid precursor protein and a β-sheet—responsive dye and measuring a fluorescence intensity resulting from the β-sheet—responsive dye prior to and following contacting the BChE derived peptide with the amyloid precursor protein, wherein delayed or reduced increase in the fluorescence intensity following contact formation between the BCHE derived peptide with the amyloid precursor protein is indicative of an ability of the peptide to prevent amyloid fibril formation.

[0062] Contacting according to this aspect of the present invention is effected by means of mixing, shaking or dissolving the BChE derived peptide with the amyloid precursor protein and the β-sheet responsive dye. Preferably, contacting is effected by shaking at a shaking speed of 50-300 rpm, more preferably at a shaking speed of 200 rpm.

[0063] According to preferred embodiments of the present invention, contacting is effected for a time period of at least 5 minutes, more preferably, at least 10 minutes, more preferably, at least 15 minutes, more preferably, at least 20 minutes, more preferably, at least 25 minutes, more preferably, at least 30 minutes, more preferably, at least 40 minutes, more preferably, at least 50 minutes, more preferably, at least 60 minutes, more preferably, at least 2 hours, more preferably, at least 4 hours, more preferably, at least 6 hours, most preferably, at least 8 hours.

[0064] Measuring the fluorescence intensity according to this aspect of the present invention is preferably effected using a Spectro-fluorometer (e.g., Tecan, Maennedorf, Switzerland). It will be appreciated that measuring can be effected at any given time prior to, during or following contacting the BChE derived peptide. In order to obtain a basal level of the fluorescent intensity generated by the β-sheet—responsive dye, measuring is effected both prior to the addition of the BChE derived peptide and at time intervals following the addition of the BChE derived peptide. The time intervals for measuring the fluorescent intensity may vary depending on the dye used. According to preferred embodiments of the present invention, such time intervals are at least every 60 minutes, more preferably, at least every 50 minutes, more preferably, at least every 40 minutes, more preferably, at least every 30 minutes, more preferably, at least every 20 minutes, more preferably, at least every 10 minutes, most preferably, at least every 5 minutes.

[0065] It will be appreciated by one of ordinary skills in the art that this is a high throughput screening method which is readily automateable and which can be used to test, for example, within a short time period each one of the peptides represented by SEQ ID NOs:8-20302, all are BChE derived peptides, for its ability to prevent and/or reverse amyloid fibril formation. In a presently preferred embodiment of the present invention the β-sheet—responsive dye is a benzothiazole dye, such as, but not limited to Thioflavin T. The Thioflavin T is preferably provided at a concentration range of 0.5-1.5 μM, most preferably the Thioflavin T is provided at a concentration of about 1 μM.

[0066] As used herein, the phrase “amyloid fibril” refers to the intra- or extracellular tissue deposits, in one or more tissue or organs, of fibril protein material which is generically termed amyloid. The amyloid is distinguished grossly by a starch-like staining reaction with iodine, microscopically by its extracellular distribution and tinctorial and optical properties when bound to Congo red or Thioflavin T, or by its capacity to bind and induce fluorescence in bound Thioflavin T and by its protein fibril structure as shown by electron microscopy and X-ray crystallography. Amyloid fibrils are formed by conformation changes which lead to misfolding of the amyloid precursor protein, such as a conformation conversion from an α-helix configuration to a β-pleated sheet structure. Thus, amyloid fibrils initiate from an innoculum of misfolded proteins which further facilitates fibril formation around it (Reviewed in Lachmann H J and Hawkins P N, 2003. Nephron Clin. Pract. 94: c85-8). The protein precursor of the amyloid fibril of the present invention is, for example, Transthyretin, Amyloid beta protein, Procalcitonin, IAPP (Amylin), amyloid light chain (AL), non-immunoglobulin amyloid associated (AA), non-immunoglobulin amyloid associated serum precursor (SAA), α-synucleic protein, ataxin and huntingtin.

[0067] The amyloid precursor protein used in the assay method described herein can be any amyloid precursor proteins listed above. Preferably, the amyloid precursor protein used in the assay method is Amyloid beta (1-40) and it is provided in the assay method at a concentration in the range of 20-50 μM, preferably about 33 μM.

[0068] As stated above, it will be appreciated by the skilled artisan that the method described above can be used to identify and point out BChE derived peptides capable of preventing and/or reversing amyloid fibril formation using automated high throughput installations.

[0069] Hence, according to another aspect of the present invention there is provided a BChE derived peptide capable of preventing and/or reversing amyloid fibril formation. In presently preferred embodiments, the BChE derived peptide is selected from the group consisting of SEQ ID NOs:1 and 8-20302.

[0070] As used herein throughout the phrase “BChE derived peptide” means any peptide sequence of 5, 6, 7, 8, 9, 10, 11, 12, 13, 14, 15 or more, e.g., 16-20, 21-30, 31-40 amino acids, either natural, digest or synthetic that naturally forms a part of a polypeptide at least 60%, at least 70%, at least 80%, at least 90%, at least 95%, at least 96%, at least 97%, at least 98%, at least 99% homologous (similar+identical) to a BChE polypeptide as set forth in SEQ ID NO:2 or 20303-20314 as determined using the BlastP software of the National Center of Biotechnology Information (NCBI) using default parameters. The phrase “BChE derived peptide” further reads on functional homologs of all of the above peptides, which functional homologs can include naturally occurring or non-natural amino acids exhibiting the functional activity of preventing and/or reversing amyloid fibril formation.

[0071] Thus, amino acid substitutions can be made in any of the BChE derived peptides described herein. Amino acid substitutions are typically of single residues; insertions usually will be on the order of from about 1 to 20 amino acids, although considerably larger insertions may be tolerated. Deletions range from about 1 to about 20 residues, although in some cases deletions may be much larger.

[0072] Substitutions, deletions, insertions or any combination thereof may be used to arrive at a final derivative peptide. Generally these changes are done on a few amino acids to minimize the alteration of the functionality of the peptide molecule. However, larger changes may be tolerated in certain circumstances. When small alterations in the characteristics of the peptides of the present invention are desired, substitutions are generally made in accordance with the following Table 1:

TABLE 1

| Original Residue | Exemplary Substitutions |
|---|---|
| Ala | Ser |
| Arg | Lys |
| Asn | Gln, His |
| Asp | Glu |
| Cys | Ser |
| Gln | Asn |
| Glu | Asp |
| Gly | Pro |
| His | Asn, Gln |
| Ile | Leu, Val |
| Leu | Ile, Val |
| Lys | Arg, Gln, Glu |
| Met | Leu, Ile |
| Phe | Met, Leu, Tyr |
| Ser | Thr |
| Thr | Ser |
| Trp | Tyr |
| Tyr | Trp, Phe |
| Val | Ile, Leu |

[0073] Substantial changes in function or immunological identity are made by selecting substitutions that are less conservative than those shown in Table 1, hereinabove. For example, substitutions may be made which more significantly affect: the structure of the peptide backbone in the area of the alteration, for example the alpha-helical or beta-sheet structure; the charge or hydrophobicity of the molecule at the target site; or the bulk of the side chain. The substitutions which in general are expected to produce the greatest changes in the peptide properties are those in which (a) a hydrophilic residue, e.g., seryl or threonyl is substituted for (or by) a hydrophobic residue, e.g., leucyl, isoleucyl, phenylalanyl, valyl or alanyl; (b) a cysteine or proline is substituted for (or by) any other residue; (c) a residue having an electropositive side chain, e.g., lysyl, arginyl, or histidyl, is substituted for (or by) an electronegative residue, e.g., glutamyl or aspartyl; or (d) a residue having a bulky side chain, e.g. phenylalanine, is substituted for (or by) one not having a side chain, e.g. glycine.

[0074] Non-natural amino acids can also be used as substituents to naturally occurring amino acids:

[0075] Table 2 and 3 below list naturally occurring amino acids (Table 2) and non-conventional or modified amino acids (Table 3) which can be used with the present invention.

TABLE 2

| | Three-Letter | |
|---|---|---|
| Amino Acid | Abbreviation | One-letter Symbol |
| Alanine | Ala | A |
| Arginine | Arg | R |
| Asparagine | Asn | N |
| Aspartic acid | Asp | D |
| Cysteine | Cys | C |
| Glutamine | Gln | Q |
| Glutamic Acid | Glu | E |
| Glycine | Gly | G |
| Histidine | His | H |
| isoleucine | Iie | I |
| Leucine | Leu | L |
| Lysine | Lys | K |
| Methionine | Met | M |
| phenylalanine | Phe | F |
| Proline | Pro | P |
| Serine | Ser | S |
| Threonine | Thr | T |
| tryptophan | Trp | W |
| tyrosine | Tyr | Y |
| Valine | Val | V |
| Any amino acid as above | Xaa | X |

TABLE 3

| Non-conventional amino acid | Code | Non-conventional amino acid | Code |
|---|---|---|---|
| α-aminobutyric acid | Abu | L-N-methylalanine | Nmala |
| α-amino-α-methylbutyrate | Mgabu | L-N-methylarginine | Nmarg |
| aminocyclopropane- | Cpro | L-N-methylasparagine | Nmasn |
| carboxylate | | L-N-methylaspartic acid | Nmasp |
| aminoisobutyric acid | Aib | L-N-methylcysteine | Nmcys |
| aminonorbornyl- | Norb | L-N-methylglutamine | Nmgin |
| carboxylate | | L-N-methylglutamic acid | Nmglu |
| cyclohexylalanine | Chexa | L-N-methylhistidine | Nmhis |
| cyclopentylalanine | Cpen | L-N-methylisolleucine | Nmile |
| D-alanine | Dal | L-N-methylleucine | Nmleu |
| D-arginine | Darg | L-N-methyllysine | Nmlys |
| D-aspartic acid | Dasp | L-N-methylmethionine | Nmmet |
| D-cysteine | Dcys | L-N-methylnorleucine | Nmnle |
| D-glutamine | Dgln | L-N-methylnorvaline | Nmnva |
| D-glutamic acid | Dglu | L-N-methylornithine | Nmorn |
| D-histidine | Dhis | L-N-methylphenylalanine | Nmphe |
| D-isoleucine | Dile | L-N-methylproline | Nmpro |
| D-leucine | Dleu | L-N-methylserine | Nmser |
| D-lysine | Dlys | L-N-methylthreonine | Nmthr |
| D-methionine | Dmet | L-N-methyltryptophan | Nmtrp |
| D-ornithine | Dorn | L-N-methyltyrosine | Nmtyr |
| D-phenylalanine | Dphe | L-N-methylvaline | Nmval |
| D-proline | Dpro | L-N-methylethylglycine | Nmetg |
| D-serine | Dser | L-N-methyl-t-butylglycine | Nmtbug |
| D-threonine | Dthr | L-norleucine | Nle |
| D-tryptophan | Dtrp | L-norvaline | Nva |
| D-tyrosine | Dtyr | α-methyl-aminoisobutyrate | Maib |
| D-valine | Dval | α-methyl-γ-aminobutyrate | Mgabu |
| D-α-methylalanine | Dmala | α-methylcyclohexylalanine | Mchexa |
| D-α-methylarginine | Dmarg | α-methylcyclopentylalanine | Mcpen |
| D-α-methylasparagine | Dmasn | α-methyl-α-napthylalanine | Manap |
| D-α-methylaspartate | Dmasp | α-methylpenicillamine | Mpen |
| D-α-methylcysteine | Dmcys | N-(4-aminobutyl)glycine | Nglu |
| D-α-methylglutamine | Dmgln | N-(2-aminoethyl)glycine | Naeg |
| D-α-methylhistidine | Dmhis | N-(3-aminopropyl)glycine | Norn |
| D-α-methylisoleucine | Dmile | N-amino-α-methylbutyrate | Nmaabu |
| D-α-methylleucine | Dmleu | α-napthylalanine | Anap |
| D-α-methyllysine | Dmlys | N-benzylglycine | Nphe |
| D-α-methylmethionine | Dmmet | N-(2-carbamylethyl)glycine | Ngln |
| D-α-methylornithine | Dmorn | N-(carbamylmethyl)glycine | Nasn |
| D-α-methylphenylalanine | Dmphe | N-(2-carboxyethyl)glycine | Nglu |
| D-α-methylproline | Dmpro | N-(carboxymethyl)glycine | Nasp |
| D-α-methylserine | Dmser | N-cyclobutylglycine | Ncbut |
| D-α-methylthreonine | Dmthr | N-cycloheptylglycine | Nchep |
| D-α-methyltryptophan | Dmtrp | N-cyclohexylglycine | Nchex |
| D-α-methyltyrosine | Dmty | N-cyclodecylglycine | Ncdec |
| D-α-methylvaline | Dmval | N-cyclododeclglycine | Ncdod |
| D-α-methylalnine | Dnmala | N-cyclooctylglycine | Ncoct |
| D-α-methylarginine | Dnmarg | N-cyclopropylglycine | Ncpro |
| D-α-methylasparagine | Dnmasn | N-cycloundecylglycine | Ncund |
| D-α-methylasparatate | Dnmasp | N-(2,2-diphenylethyl)glycine | Nbhm |
| D-α-methylcysteine | Dnmcys | N-(3,3-diphenylpropyl)glycine | Nbhe |
| D-N-methylleucine | Dnmleu | N-(3-indolylyethyl)glycine | Nhtrp |
| D-N-methyllysine | Dnmlys | N-methyl-γ-aminobutyrate | Nmgabu |
| N-methylcyclohexylalanine | Nmchexa | D-N-methylmethionine | Dnmmet |
| D-N-methylornithine | Dnmorn | N-methylcyclopentylalanine | Nmcpen |
| N-methylglycine | Nala | D-N-methylphenylalanine | Dnmphe |
| N-methylaminoisobutyrate | Nmaib | D-N-methylproline | Dnmpro |
| N-(1-methylpropyl)glycine | Nile | D-N-methylserine | Dnmser |
| N-(2-methylpropyl)glycine | Nile | D-N-methylserine | Dnmser |
| N-(2-methylpropyl)glycine | Nleu | D-N-methylthreonine | Dnmthr |
| D-N-methyltryptophan | Dnmtrp | N-(1-methylethyl)glycine | Nva |
| D-N-methyltyrosine | Dnmtyr | N-methyla-napthylalanine | Nmanap |
| D-N-methylvaline | Dnmval | N-methylpenicillamine | Nmpen |
| γ-aminobutyric acid | Gabu | N-(p-hydroxyphenyl)glycine | Nhtyr |
| L-t-butylglycine | Tbug | N-(thiomethyl)glycine | Ncys |
| L-ethylglycine | Etg | penicillamine | Pen |
| L-homophenylalanine | Hphe | L-α-methylalanine | Mala |
| L-α-methylarginine | Marg | L-α-methylasparagine | Masn |
| L-α-methylaspartate | Masp | L-α-methyl-t-butylglycine | Mtbug |
| L-α-methylcysteine | Mcys | L-methylethylglycine | Metg |
| L-α-methylglutamine | Mgln | L-α-methylglutamate | Mglu |
| L-α-methylhistidine | Mhis | L-α-methylhomo phenylalanine | Mhphe |
| L-α-methylisoleucine | Mile | N-(2-methylthioethyl)glycine | Nmet |
| D-N-methylglutamine | Dnmgln | N-(3-guanidinopropyl)glycine | Narg |
| D-N-methylglutamate | Dnmglu | N-(1-hydroxyethyl)glycine | Nthr |
| D-N-methylhistidine | Dnmhis | N-(hydroxyethyl)glycine | Nser |
| D-N-methylisoleucine | Dnmile | N-(imidazolylethyl)glycine | Nhis |
| D-N-methylleucine | Dnmleu | N-(3-indolylyethyl)glycine | Nhtrp |
| D-N-methyllysine | Dnmlys | N-methyl-γ-aminobutyrate | Nmgabu |
| N-methylcyclohexylalanine | Nmchexa | D-N-methylmethionine | Dnmmet |
| D-N-methylornithine | Dnmorn | N-methylcyclopentylalanine | Nmcpen |
| N-methylglycine | Nala | D-N-methylphenylalanine | Dnmphe |
| N-methylaminoisobutyrate | Nmaib | D-N-methylproline | Dnmpro |
| N-(1-methylpropyl)glycine | Nile | D-N-methylserine | Dnmser |
| N-(2-methylpropyl)glycine | Nleu | D-N-methylthreonine | Dnmthr |
| D-N-methyltryptophan | Dnmtrp | N-(1-methylethyl)glycine | Nval |
| D-N-methyltyrosine | Dnmtyr | N-methyla-napthylalanine | Nmanap |
| D-N-methylvaline | Dnmval | N-methylpenicillamine | Nmpen |
| γ-aminobutyric acid | Gabu | N-(p-hydroxyphenyl)glycine | Nhtyr |
| L-t-butylglycine | Tbug | N-(thiomethyl)glycine | Ncys |
| L-ethylglycine | Etg | penicillamine | Pen |
| L-homophenylalanine | Hphe | L-α-methylalanine | Mala |
| L-α-methylarginine | Marg | L-α-methylasparagine | Masn |
| L-α-methylaspartate | Masp | L-α-methyl-t-butylglycine | Mtbug |
| L-α-methylcysteine | Mcys | L-methylethylglycine | Metg |
| L-α-methylglutamine | Mgln | L-α-methylglutamate | Mglu |
| L-α-methylhistidine | Mhis | L-α-methylhomophenylalanine | Mhphe |
| L-α-methylisoleucine | Mile | N-(2-methylthioethyl)glycine | Nmet |
| L-α-methylleucine | Mleu | L-α-methyllysine | Mlys |
| L-α-methylmethionine | Mmet | L-α-methylnorleucine | Mnle |
| L-α-methylnorvaline | Mnva | L-α-methylornithine | Morn |
| L-α-methylphenylalanine | Mphe | L-α-methylproline | Mpro |
| L-α-methylserine | mser | L-α-methylthreonine | Mthr |
| L-α-methylvaline | Mtrp | L-α-methyltyrosine | Mtyr |
| L-α-methylleucine | Mval | L-N-methylhomophenylalanine | Nmhphe |
| N-(N-(2,2-diphenylethyl) | Nnbhm | N-(N-(3,3-diphenylpropyl) | Nnbhe |
| carbamylmethyl-glycine | Nnbhm | carbamylmethyl(1)glycine | |
| 1-carboxy-1-(2,2-diphenyl | Nmbc | | |
| ethylamino)cyclopropane | | | |

[0076] According to preferred embodiments of the present invention, a BChE derived peptide is a peptide that includes at least 5, preferably at least 6 amino acids, preferably, at least 7, more preferably, at least 8, more preferably, at least 9, more preferably, at least 10, more preferably, at least 11, more preferably, at least 12, more preferably, at least 13, more preferably, at least 14, more preferably, at least 15, more preferably, at least 16, more preferably, at least 17, more preferably, at least 18, more preferably, at least 19, more preferably, at least 20, more preferably, at least 21, more preferably, at least 22, more preferably, at least 23, more preferably, at least 24, more preferably, at least 25, more preferably, at least 26, more preferably, at least 27, more preferably, at least 28, more preferably, at least 29, more preferably, at least 30, more preferably, at least 31, more preferably, at least 32, more preferably, at least 33, more preferably, at least 34, more preferably, at least 35, more preferably, at least 36, more preferably, at least 37, more preferably, at least 38, more preferably, at least 39, most preferably, at least 40 amino acids of the BChE polypeptide as set forth by SEQ ID NO:2.

[0077] Following is a summary of non-limiting BChE derived peptides which can be used in context of the present invention.

TABLE 4
Human BChE derived peptides

| Length (amino acids) | SEQ ID NOs: |
|---|---|
| 6 | 8-599 |
| 7 | 600-1195 |
| 8 | 1196-1790 |
| 9 | 1791-2384 |
| 10 | 2385-2977 |
| 11 | 2978-3569 |
| 12 | 3570-4171 |
| 13 | 4161-4750 |
| 14 | 4751-5339 |
| 15 | 5340-5927 |
| 16 | 5928-6514 |
| 17 | 6515-7100 |
| 18 | 7101-7685 |
| 19 | 7686-8269 |
| 20 | 8270-8852 |
| 21 | 8853-9434 |
| 22 | 9435-10015 |
| 23 | 10016-10595 |
| 24 | 10596-11174 |
| 25 | 11175-11752 |
| 26 | 11753-12329 |
| 27 | 12330-12905 |
| 28 | 12906-13480 |
| 29 | 13481-14054 |
| 30 | 14055-14627 |
| 31 | 14628-15199 |
| 32 | 15200-15770 |
| 33 | 15771-16340 |
| 34 | 16341-16909 |
| 35 | 16910-17477 |
| 36 | 17478-18044 |
| 37 | 18045-18610 |
| 38 | 18611-19175 |
| 39 | 19176-19739 |
| 40 | 19740-20302 |

Table 4: SEQ ID numbers of human BChE derived peptides are presented according to their size (number of amino acids). The hBChE derived peptides were designed according to the hBChE sequence (SEQ ID NO: 2), SwissProt. Accession No. P06276.

[0078] It is hereby reiterated, any of the BChE derived peptides described herein can be tested for it ability in preventing and/or reversing fibril formation using the assay method described hereinabove.

[0079] According to yet another aspect of the present invention there is provided a pharmaceutical composition comprising as an active ingredient BChE or a BChE derived peptide, the peptide being capable of preventing and/or reversing amyloid fibril formation; and a pharmaceutically acceptable carrier. Any one or more of the BChE derived peptides described herein and their functional analogs can be used as the active ingredient of the pharmaceutical composition of the present invention.

[0080] According to yet another aspect of the present invention there is provided a method of treating an individual having or being predisposed to a disease or disorder associated with amyloid fibril formation. The method according to this aspect of the invention comprises administering to the individual a therapeutically effective amount of BChE or BChE derived peptide, thereby treating the individual having or being predisposed to a disease or disorder associated with amyloid fibril formation.

[0081] As used herein, the term “treating” refers to inhibiting or arresting the development of a disease, disorder or condition and/or causing the reduction, remission, or regression of a disease, disorder or condition. Those of skills in the art will understand that various methodologies and assays can be used to assess the development of a disease, disorder or condition and similarly, various methodologies and assays may be used to assess the reduction, remission or regression of a disease, disorder or condition.

[0082] As used herein the term “individual” includes both young and old human beings of both sexes it also refers to animals such as live stock animals. The term also encompasses individuals who are at risk to develop the amyloid fibril associated disease or disorder as described hereinabove.

[0083] Any one or more of the BChE derived peptides described herein and their functional homologs can be used in the methods of the present invention. While implementing the method of the present invention and according to presently preferred embodiments of the present invention, the BChE or BChE derived peptide is administered to treated individuals in the form of a pharmaceutical composition.

[0084] The presently preferred peptides to be used in the therapeutic method and pharmaceutical composition described herein are selected from the group consisting of SEQ ID NO:1 and 8-20302.

[0085] Many diseases and disorders can be treated using the therapeutic peptides, pharmaceutical compositions and therapeutic methods of the invention, these diseases and disorders are associated with amyloid fibril formation, such as, for example, neurodegenerative disease, e.g., Alzheimer's disease, Huntington's disease and Parkinson's disease; disorders associated with systemic amyloidosis, such as, but not limited to, Multiple myeloma, Chronic inflammatory disease, Rheumatoid arthritis, Tuberculosis, Skin abscess, lung abscess, Cancer, Hodgkin's disease, Hemodialysis for chronic renal failure, Heredofamilial amyloidosis, Familial Mediterranean Fever and Familial amyloid polyneuropathy (Cardoso I, et al., 2003, FASEB J. 17: 803-9); disorders associated with localized amyloidosis, such as, but not limited to, Senile cardiac amyloidosis, Senile cerebral amyloidosis, Endocrine tumors, Medullary carcinoma of thyroid, Type II diabetes and Pancreatic islets β-cells; prion diseases, such as, but not limited to, Creutzfeldt-Jakob disease (CJD), spongioform enchephalopathies (TSE's), mad cow disease, Gerstmann-Straussler-Scheinker disease (GSS) and Kuru (Guiroy D C, et al., 1994; Acta Neuropathol. (Berl). 87: 526-30). Spino-Cerebellar Ataxia (SCA); and/or polyglutamine disorders, such as, but not limited to, Huntington's disease (HD; Fox J H et al., 2004, J. Neurochem. 91: 413-22), Spinal and Bulbar Muscular Atrophy (SBMA), DentatoRubral and PallidoLuysian Atrophy (DRPLA), spinocerebellar ataxia type 1 (SCA1; Emamian E S et al., Neuron. 2003 May 8; 38(3):375-87), spinocerebellar ataxia type 2 (SCA2; Satterfield T F, et al., 2002, Genetics, 162: 1687-702), Spinocerebellar ataxia type-3 (SCA3; Machado-Joseph Disease; Berke S J et al., 2004, J. Neurochem. 89: 908-18; Chow M K et al., 2004, J. Biol. Chem. 279: 47643-51), Spinocerebellar ataxia type 7 (SCA7; Helmlinger D et al., 2004, J. Neurosci. 24: 1881-7), and Spinocerebellar ataxia type 17 (SCA17; Tsuji S, 2004, Arch Neurol. 61: 183-4; Oda M, et al., 2004, Arch Neurol. 61: 209-12; Ross C A, 2002, Neuron. 35: 819-22). Any one of these diseases and disorders is associated with amyloid fibril formation of one or more of the following proteins: Transthyretin, Amyloid beta protein, Procalcitonin, IAPP (Amylin), amyloid light chain (AL), non-immunoglobulin amyloid associated (AA), non-immunoglobulin amyloid associated serum precursor (SAA), α-synucleic protein, ataxin and huntingtin.

[0086] The classification of amyloidosis is based upon the tissue distribution of amyloid deposits (local or systemic amyloidosis), the absence or presence of preexisting disease (primary or secondary amyloidosis) and the chemical type of amyloid protein fibril. By convention, amyloid fibril types are designated by two letters: A for amyloid followed by a letter for the chemical type. There are two, chemically distinct, major types of amyloid protein fibrils designated AL (amyloid light chain) and AA (non-immunoglobulin amyloid associated), as well as several minor types. AL fibrils associated mainly with multiple myeloma are related to monoclonal immunoglobulin light chains synthesized by abnormal plasma cells. AA fibrils associated mainly with chronic inflammatory diseases are related to the non-immunoglobulin amyloid associated (AA) protein and its serum precursor (SAA), an acute phase reactant synthesized by liver cells.

[0087] Tables 5 and 6, hereinbelow present the classifications of various amyloidosis—related disorders.

TABLE 5
Classification of amyloidosis: Systemic Amyloidosis

| Clinical | | Amyloid | |
|---|---|---|---|
| Classification | Associated Condition | Fibril Type | Precursor |
| Primary or | Multiple myeloma | AL | Ig lambda |
| Secondary | | | (or kappa |
| | | | chains) |
| Secondary | Chronic inflammatory | AA | SAA |
| | disease, Rheumatoid | | |
| | arthritis, Tuberculosis, | | |
| | Skin and lung abscesses | | |
| Secondary | Cancer, Hodgkin's | AA | SAA |
| | disease | | |
| Secondary | Hemodialysis for CRF | Beta2-m | Beta-2-m |
| Primary | Heredofamilial | AA | SAA |
| | amyloidosis, Familial | Transthyretin | Transthyretin |
| | Mediterranean Fever, | | |
| | Familial amyloid | | |
| | polyneuropathy | | |

Table 5: Classification of systemic amyloids is presented. CRF = chronic renal failure; Beta-2-m = beta 2-microglobulin (a normal serum protein and a component of MHC class I molecules); Transthyretin = a normal serum protein that transports thyroxin and retinol (vitamin A) and is deposited in a variant form.

TABLE 6
Classification of amyloidosis: Localized amyloidosis

| Associated | | |
|---|---|---|
| Condition | Amyloid Fibril Type | Precursor |
| Senile cardiac | Transthyretin | Transthyretin |
| amyloidosis | | |
| Senile cerebral | Amyloid beta protein | Amyloid precursor |
| amyloidosis: | | protein (APP) |
| Alzheimer's | | |
| disease | | |
| Endocrine tumors, | Procalcitonin | Calcitonin |
| Medullary | | |
| carcinoma of | | |
| thyroid | | |
| Type II diabetes | IAPP (Amylin) | IAPP (Amylin) |
| Pancreatic islets | | |
| β-cells | | |

Table 6: Classification of localized amyloids is presented.

[0088] The therapeutically effective amount preferably used in context of the therapeutic methods of the present invention is 0.1-1000 micromol of the BChE derived peptide per kg body weight, more preferably, 1-100 micromol per kg body weight, yet more preferably, 5-50 micromol per kg body weight.

[0089] According to still another aspect of the present invention there is provided a method of preventing and/or reversing amyloid fibril formation in a tissue of an individual. The method according to this aspect of the present invention comprises increasing a level of BChE or a BChE derived peptide being capable of preventing and/or reversing amyloid fibril formation in the tissue, thereby preventing and/or reversing amyloid fibril formation therein.

[0090] The term “tissue” as used herein refers to part of an organism consisting of an aggregate of cells structured and arranged to perform at least one biological or physiological function, such as brain tissue, retina, skin tissue, hepatic tissue, pancreatic tissue, bone tissue, cartilage tissue, joint tissue, lymph node tissue, connective tissue, blood tissue, muscle tissue, cardiac tissue, brain tissue, vascular tissue, renal tissue, pulmonary tissue, gonadal tissue, hematopoietic tissue and fat tissue. Amyloid fibrils and amyloid fibrils associated diseases and disorders may be associated with any one of the above listed tissues.

[0091] According to yet another aspect of the present invention there is provided a method of treating an individual having or being predisposed to a disease or disorder associated with amyloid fibril formation. The method according to this aspect of the present invention comprises increasing a level of BChE or a BChE derived peptide in a tissue susceptible to amyloid fibril formation in that individual, thereby treating the individual having or being predisposed to a disorder associated with amyloid fibril formation.

[0092] As is further detailed below, increasing a level of BChE or a BChE derived peptide being capable of preventing and/or reversing amyloid fibril formation is effected by at least one approach selected from the group consisting of (a) expressing in cells of the individual an exogenous polynucleotide encoding the BChE or the BChE derived peptide; (b) increasing expression of endogenous BChE in the individual; (c) increasing endogenous BChE activity in the individual; (d) administering BChE or the BChE derived peptide to the individual; and (e) administering to the individual cells expressing the BChE or the BChE derived peptide.

[0093] Increasing the level of BChE or a BChE derived peptide capable of preventing and/or reversing amyloid fibril formation can be effected in many ways, such as by upregulating expression of endogenous BChE or by introducing into the tissue exogenous BChE, portions thereof or polynucleotide sequences encoding either.

[0094] Upregulation of endogenous BChE can be effected at the genomic level (i.e., activation of transcription via promoters, enhancers, regulatory elements), at the transcript level (i.e., correct splicing, polyadenylation, activation of translation) or at the protein level (i.e., post-translational modifications, interaction with inhibitors and/or substrates and the like). For example, upregulating the endogenous expression of BChE can be achieved by administering at least one natural or synthetic substrate and/or ligand of a transcription factor controlling BChE gene expression in amounts sufficient to induce a natural response of overproduction of BChE. However, since peripheral site ligands activate the hydrolytic activity of BChE (Glick, 2003), it is possible to modulate this activity by co-administration of the ligand with specific BChE inhibitors.

[0095] Thus, an agent capable of upregulating BChE may be any compound which is capable of increasing the transcription and/or translation of an endogenous DNA or mRNA encoding the BChE and thus increasing endogenous BChE activity.

[0096] Upregulating expression of BChE via exogenous polypeptide or polynucleotide sequences can be effected by introducing into cells of the tissue an exogenous polynucleotide sequence designed and constructed to express at least a portion of the BChE. Accordingly, the exogenous polynucleotide sequence may be a DNA or RNA sequence encoding a BChE molecule, capable of preventing and/or reversing amyloid fibril formation.

[0097] BChE sequences have been cloned from various sources including human (Prody, PNAS, 1987; Arpagaus, M. et al., 1990, Biochemistry 29: 124-131; GenBank Accession No. P06276; SEQ ID NO:2), rat (Nakahara T, et al., 2003, Urol. Res. 31: 223-226; GenBank Accession No. NP_{—}075231; SEQ ID NO:20303), mouse (Rachinsky T L, et al., 1990, Neuron 5: 317-327; GenBank Accession No. NP_{—}033868, Q03311; SEQ ID NO:20304), cat (Bartels C F, et al., 2000, Biochem. Pharmacol. 60: 479-487; GenBank Accession No. 062760; SEQ ID NO:20305), tiger (GenBank Accession No. 062761; SEQ ID NO:20306), sheep (Arpagaus M, et al., 1991, J. Biol. Chem. 266: 6966-6974; GenBank Accession No. P32753; SEQ ID NO:20607), pig [Arpagaus, 1991 (Supra); GenBank Accession No. P32752; SEQ ID NO:20308], monkey [Arpagaus, 1991 (Supra); GenBank Accession No. P32751; SEQ ID NO:20309], dog [Arpagaus, 1991 (Supra); GenBank Accession No. P32750; SEQ ID NO:20310], bovine [Arpagaus, 1991 (Supra); GenBank Accession No. P32749; SEQ ID NO:20311], rabbit, (Jbilo, O. and Chatonnet, A., 1990, Nucleic Acids Res. 18: 3990; GenBank Accession No. P21927; SEQ ID NO:20312), horse [Moora D R, et al., In: Doctor, B. P., et al., (Eds.); STRUCTURE AND FUNCTION OF CHOLINESTERASES AND RELATED PROTEINS, pp. 145-146, Plenum Press, New York and London (1998); GenBank Accession No. P81908; SEQ ID NO:20313], chicken (GenBank Accession No. NP_{—}989977; SEQ ID NO:20314) sources. Thus, coding sequences information for BChE is available from several databases including the GenBank database available through—www.ncbi.nlm.nih.gov/ and the SwissProt database available through—au.expasy.org/sprot/.

[0098] To express exogenous BChE in mammalian cells, a polynucleotide sequence encoding a BChE is preferably ligated into a nucleic acid construct suitable for expression in mammalian cells. Such a nucleic acid construct includes a promoter sequence for directing transcription of the polynucleotide sequence in the cell in a constitutive or inducible manner.

[0099] It will be appreciated that the nucleic acid construct of the present invention can utilize BChE as set forth in SEQ ID NO:7 or homologs thereof which exhibit the desired activity (e.g., prevention and/or reversal of amyloid fibril formation). Such homologues can be, for example, at least 70%, preferably, at least 71%, more preferably, at least 72%, more preferably, at least 73%, more preferably, at least 74%, more preferably, at least 75%, more preferably, at least 76%, more preferably, at least 77%, more preferably, at least 78%, more preferably, at least 79%, more preferably, at least 80%, at least 81%, at least 82%, at least 83%, at least 84%, at least 85%, at least 86%, at least 87%, at least 88%, at least 89%, at least 90%, at least 91%, at least 92%, at least 93%, at least 94%, at least 95%, at least 96%, at least 97%, at least 98%, at least 99% or 100% identical to SEQ ID NO:7, as determined using the BestFit software of the Wisconsin sequence analysis package, utilizing the Smith and Waterman algorithm, where gap weight equals 50, length weight equals 3, average match equals 10 and average mismatch equals −9.

[0100] Similarly, the nucleic acid construct of the present invention includes a polynucleotide encoding a polypeptide at least 70%, preferably, at least 71%, more preferably, at least 72%, more preferably, at least 73%, more preferably, at least 74%, more preferably, at least 75%, more preferably, at least 76%, more preferably, at least 77%, more preferably, at least 78%, more preferably, at least 79%, more preferably, at least 80%, more preferably, at least 81%, more preferably, at least 82%, more preferably, at least 82%, more preferably, at least 83%, more preferably, at least 84%, more preferably, at least 85%, more preferably, at least 86%, more preferably, at least 87%, more preferably, at least 88%, more preferably, at least 89%, more preferably, at least 90%, more preferably, at least 91%, more preferably, at least 92%, more preferably, at least 93%, more preferably, at least 94%, more preferably, at least 95%, more preferably, at least 96%, more preferably, at least 97%, more preferably, at least 98%, more preferably, at least 99% homologous (similar+identical) to the polypeptide set forth by SEQ ID NO:2, as determined using the BlastP software of the National Center of Biotechnology Information (NCBI) using default parameters.

[0101] Constitutive promoters suitable for use with the present invention are promoter sequences which are active under most environmental conditions and most types of cells such as the cytomegalovirus (CMV) and Rous sarcoma virus (RSV). Inducible promoters suitable for use with the present invention include, for example, the oxidative stress-inducible peroxidase (POD) promoter (Kim K Y, et al., 2003, Plant Mol. Biol. 51: 831-8) which is expected to upregulate the expression BChE in response to the oxidative stress present e.g., in the brain of Alzheimer's patients (Boyd-Kimball D, et al., 2004, Chem. Res. Toxicol. 17: 1743-9), as well as the tetracycline-inducible promoter (Zabala M, et al., 2004, Cancer Res. 64: 2799-804) which can be activated by tetracycline uptake.

[0102] It will be appreciated that specific upregulation of BChE expression in amyloid fibril—containing cells or tissues can be achieved using a promoter which is induced in the presence of amyloid fibrils, such as the BACE1 (beta-secretase) (Tong Y, et al., J Neural Transm. 2004 Dec. 22; Epub ahead of print) and caveolin-3 (Nishiyama K, et al., 1999, J. Neurosci. 19: 6538-48) promoters.

[0103] The nucleic acid construct (also referred to herein as an “expression vector”) used while implementing the present invention preferably includes additional sequences which render this vector suitable for replication and integration in prokaryotes, eukaryotes, or preferably both (e.g., shuttle vectors). In addition, a typical cloning vector may also contain a transcription and translation initiation sequence, transcription and translation terminator and a polyadenylation signal.

[0104] Eukaryotic promoters typically contain two types of recognition sequences, the TATA box and upstream promoter elements. The TATA box, located 25-30 base pairs upstream of the transcription initiation site, is thought to be involved in directing RNA polymerase to begin RNA synthesis. The other upstream promoter elements determine the rate at which transcription is initiated.

[0105] Enhancer elements can stimulate transcription up to 1,000 fold from linked homologous or heterologous promoters. Enhancers are active when placed downstream or upstream from the transcription initiation site. Many enhancer elements derived from viruses have a broad host range and are active in a variety of tissues. For example, the SV40 early gene enhancer is suitable for many cell types. Other enhancer/promoter combinations that are suitable for the present invention include those derived from polyoma virus, human or murine cytomegalovirus (CMV), the long term repeat from various retroviruses such as murine leukemia virus, murine or Rous sarcoma virus and HIV. See, Enhancers and Eukaryotic Expression, Cold Spring Harbor Press, Cold Spring Harbor, N.Y. 1983, which is incorporated herein by reference.

[0106] In the construction of the expression vector, the promoter is preferably positioned approximately the same distance from the heterologous transcription start site as it is from the transcription start site in its natural setting. As is known in the art, however, some variation in this distance can be accommodated without loss of promoter function.

[0107] Polyadenylation sequences can also be added to the expression vector in order to increase the stability (Soreq et al., JMB, 1974) or efficiency of BChE mRNA translation. Two distinct sequence elements are required for accurate and efficient polyadenylation: GU or U rich sequences located downstream from the polyadenylation site and a highly conserved sequence of six nucleotides, AAUAAA, located 11-30 nucleotides upstream. Termination and polyadenylation signals that are suitable for the present invention include those derived from SV40.

[0108] In addition to the elements already described, the expression vector of the present invention may typically contain other specialized elements intended to increase the level of expression of cloned nucleic acids or to facilitate the identification of cells that carry the recombinant DNA. For example, a number of animal viruses contain DNA sequences that promote the extra chromosomal replication of the viral genome in permissive cell types. Plasmids bearing these viral replicons are replicated episomally as long as the appropriate factors are provided by genes either carried on the plasmid or with the genome of the host cell.

[0109] The vector may or may not include a eukaryotic replicon. If a eukaryotic replicon is present, then the vector is amplifiable in eukaryotic cells using the appropriate selectable marker. If the vector does not comprise a eukaryotic replicon, no episomal amplification is possible. Instead, the recombinant DNA integrates into the genome of the engineered cell, where the promoter directs expression of the desired nucleic acid.

[0110] The expression vector of the present invention can further include additional polynucleotide sequences that allow, for example, the translation of several proteins from a single mRNA such as an internal ribosome entry site (IRES) and sequences for genomic integration of the promoter-chimeric polypeptide.

[0111] Examples for mammalian expression vectors include, but are not limited to, pcDNA3, pcDNA3.1(+/−), pGL3, pZeoSV2(+/−), pSecTag2, pDisplay, pEF/myc/cyto, pCMV/myc/cyto, pCR3.1, pSinRep5, DH26S, DHBB, pNMT1, pNMT41, pNMT81, which are available from Invitrogen, pCI which is available from Promega, pMbac, pPbac, pBK-RSV and pBK-CMV which are available from Strategene, pTRES which is available from Clontech and their derivatives.

[0112] To enable secretion of the expressed BChE or BChE derived peptides into the extracellular environment from cells transformed with any of the expression vectors described herein, the expression vector preferably includes additional sequences encoding for signal peptide for seretion being in frame with the sequence encoding for the BChE or BChE derived peptides, so as to allow secretion of the recombinant BChE or derived derived peptides.

[0113] Expression vectors containing regulatory elements from eukaryotic viruses such as retroviruses can be also used. SV40 vectors include pSVT7 and pMT2. Vectors derived from bovine papilloma virus include pBV-1MTHA and vectors derived from Epstein Bar virus include pHEBO and p205. Other exemplary vectors include pMSG, pAV009/A⁺, pMTO10/A⁺, pMAMneo-5, baculovirus pDSVE and any other vector allowing expression of proteins under the direction of the SV-40 early promoter, SV-40 later promoter, metallothionein promoter, murine mammary tumor virus promoter, Rous sarcoma virus promoter, polyhedrin promoter, or other promoters shown effective for expression in eukaryotic cells.

[0114] As described above, viruses are very specialized infectious agents that have evolved, in many cases, to elude host defense mechanisms. Typically, viruses infect and propagate in specific cell types. The targeting specificity of viral vectors utilizes its natural specificity to specifically target predetermined cell types and thereby introduce a recombinant gene into the infected cell. Thus, the type of vector used by the present invention will depend on the cell type transformed. The ability to select suitable vectors according to the cell type transformed is well within the capabilities of the ordinary skilled artisan and as such no general description of selection consideration is provided herein. For example, bone marrow cells can be targeted using the human T cell leukemia virus type I (HTLV-I) and kidney cells may be targeted using the heterologous promoter present in the baculovirus Autographa californica nucleopolyhedrovirus (AcMNPV) as described in Liang C Y et al., 2004 (Arch Virol. 149: 51-60).

[0115] Recombinant viral vectors are useful for in vivo expression of BChE since they offer advantages such as lateral infection and targeting specificity. Lateral infection is inherent in the life cycle of, for example, retrovirus and is the process by which a single infected cell produces many progeny virions that bud off and infect neighboring cells. The result is that a large area becomes rapidly infected, most of which was not initially infected by the original viral particles. This is in contrast to vertical-type of infection in which the infectious agent spreads only through daughter progeny. Viral vectors can also be produced that are unable to spread laterally. This characteristic can be useful if the desired purpose is to introduce a specified gene into only a localized number of targeted cells.

[0116] Various methods can be used to introduce the expression vector of the present invention into stem cells. Such methods are generally described in Sambrook et al., Molecular Cloning: A Laboratory Manual, Cold Springs Harbor Laboratory, New York (1989, 1992), in Ausubel et al., Current Protocols in Molecular Biology, John Wiley and Sons, Baltimore, Md. (1989), Chang et al., Somatic Gene Therapy, CRC Press, Ann Arbor, Mich. (1995), Vega et al., Gene Targeting, CRC Press, Ann Arbor Mich. (1995), Vectors: A Survey of Molecular Cloning Vectors and Their Uses, Butterworths, Boston Mass. (1988) and Gilboa et at. [Biotechniques 4 (6): 504-512, 1986] and include, for example, stable or transient transfection, lipofection, electroporation and infection with recombinant viral vectors. In addition, see U.S. Pat. Nos. 5,464,764 and 5,487,992 for positive-negative selection methods.

[0117] Introduction of nucleic acids by viral infection offers several advantages over other methods such as lipofection and electroporation, since higher transfection efficiency can be obtained due to the infectious nature of viruses.

[0118] It will be appreciated that increasing the BChE or BChE derived peptide level can be also effected by administration of BChE or BChE derived peptide expressing cells into the individual which cells are capable of secreting BChE or BChE derived peptide into the cellular environment of the amyloid fibrils, i.e., in the tissues where amyloid fibrils are present. Examples for such tissues include, but are not limited to, brain, lung, skin, lymph nodes.

[0119] BChE or BChE derived peptide expressing cells can be any suitable cells, such as embryonic stem cells (e.g., embryonic germ cells, embryonic stem cells or cord blood cells), adult stem cells (e.g., bone marrow cells, mesenchymal stem cells, adult tissue stem cells), neuronal cells, hematopoietic cells, keratinocyte cells, lymph node cells which are derived from the individual and are transfected ex vivo with an expression vector containing the polynucleotide designed to express and secrete BCHE or BChE derived peptide as described hereinabove.

[0120] Administration of the BChE or BChE derived peptide expressing cells of the present invention can be effected using any suitable route such as intravenous, intra peritoneal, intra spine, intra gastrointestinal track, subcutaneous, transcutaneous, intramuscular, intracutaneous, intrathecal, epidural and rectal. According to presently preferred embodiments, the BChE or BChE derived peptide expressing cells of the present invention are introduced to the individual using intravenous, intra spine and/or intra peritoneal administrations.

[0121] BChE or BChE derived peptide expressing cells of the present invention can be derived from either autologous sources such as self bone marrow cells, mesenchymal stem cells and/or adult tissue stem cells or from allogeneic sources such as bone marrow or other cells derived from non-autologous sources. Since non-autologous cells are likely to induce an immune reaction when administered to the body several approaches have been developed to reduce the likelihood of rejection of non-autologous cells. These include either suppressing the recipient immune system or encapsulating the non-autologous cells or tissues in immunoisolating, semipermeable membranes before transplantation.

[0122] Encapsulation techniques are generally classified as microencapsulation, involving small spherical vehicles and macroencapsulation, involving larger flat-sheet and hollow-fiber membranes (Uludag, H. et al. Technology of mammalian cell encapsulation. Adv Drug Deliv Rev. 2000; 42: 29-64).

[0123] Methods of preparing microcapsules are known in the arts and include for example those disclosed by Lu M Z, et al., Cell encapsulation with alginate and alpha-phenoxycinnamylidene-acetylated poly(allylamine). Biotechnol Bioeng. 2000, 70: 479-83, Chang T M and Prakash S. Procedures for microencapsulation of enzymes, cells and genetically engineered microorganisms. Mol. Biotechnol. 2001, 17: 249-60 and Lu M Z, et al., A novel cell encapsulation method using photosensitive poly(allylamine alpha-cyanocinnamylideneacetate). J Microencapsul. 2000, 17: 245-51.

[0124] For example, microcapsules are prepared by complexing modified collagen with a ter-polymer shell of 2-hydroxyethyl methylacrylate (HEMA), methacrylic acid (MAA) and methyl methacrylate (MMA), resulting in a capsule thickness of 2-5 μm. Such microcapsules can be further encapsulated with additional 2-5 μm ter-polymer shells in order to impart a negatively charged smooth surface and to minimize plasma protein absorption (Chia, S. M. et al. Multi-layered microcapsules for cell encapsulation Biomaterials. 2002 23: 849-56).

[0125] Other microcapsules are based on alginate, a marine polysaccharide (Sambanis, A. Encapsulated islets in diabetes treatment. Diabetes Thechnol. Ther. 2003, 5: 665-8) or its derivatives. For example, microcapsules can be prepared by the polyelectrolyte complexation between the polyanions sodium alginate and sodium cellulose sulphate with the polycation poly(methylene-co-guanidine) hydrochloride in the presence of calcium chloride.

[0126] It will be appreciated that cell encapsulation is improved when smaller capsules are used. Thus, the quality control, mechanical stability, diffusion properties and in vitro activities of encapsulated cells improved when the capsule size was reduced from 1 mm to 400 μm (Canaple L. et al., Improving cell encapsulation through size control. J Biomater Sci Polym Ed. 2002; 13: 783-96). Moreover, nanoporous biocapsules with well-controlled pore size as small as 7 nm, tailored surface chemistries and precise microarchitectures were found to successfully immunoisolate microenvironments for cells (Williams D. Small is beautiful: microparticle and nanoparticle technology in medical devices. Med Device Technol. 1999, 10: 6-9; Desai, T. A. Microfabrication technology for pancreatic cell encapsulation. Expert Opin Biol Ther. 2002, 2: 633-46).

[0127] It will be appreciated that prevention and/or reversing the formation of amyloid fibrils in an individual who is at risk of developing amyloid fibrils (e.g., an individual who is predisposed to an amyloid fibril—related disease or disorder as described hereinbelow) can be effected by transplanting BChE or BChE derived peptide expressing stem cells in the individual. Such cells can be for example, embryonic or adults stem cells [e.g., bone marrow cells, mesenchymal stem cells (MSC)] which following their differentiation in the individual are immune to fibril formation.

[0128] It will be appreciated and it is described above in greater detail, increasing the level of BChE and or/BChE derived peptide can also be effected by direct administration of same to a treated individual, preferably formulated in a pharmaceutical composition.

[0129] The polynucleotide, polypeptide, peptide or cells expressing and/or secreting same of the present invention can be administered to an organism per se, or in a pharmaceutical composition where it is mixed with suitable carriers or excipients.

[0130] As used herein a “pharmaceutical composition” refers to a preparation of one or more of the active ingredients described herein with other chemical components such as physiologically suitable carriers and excipients. The purpose of a pharmaceutical composition is to facilitate administration of a compound to an organism.

[0131] Herein the term “active ingredient” refers to the polynucleotide, polypeptide, peptide or cells expressing and/or secreting same accountable for the biological effect.

[0132] Hereinafter, the phrases “physiologically acceptable carrier” and “pharmaceutically acceptable carrier” which may be interchangeably used refer to a carrier or a diluent that does not cause significant irritation to an organism and does not abrogate the biological activity and properties of the administered compound. An adjuvant is included under these phrases. The pharmaceutically acceptable carrier can be selected for reducing an immugenicity of the active ingredient, e.g., BChE derived peptide, of the present invention and/or the pharmaceutically acceptable carrier can be designed to allow sustained/controlled and/or slow release of the active ingredient. PEG and liposomes can be used to achieve one or more of these aims.

[0133] Herein the term “excipient” refers to an inert substance added to a pharmaceutical composition to further facilitate administration of an active ingredient. Examples, without limitation, of excipients include calcium carbonate, calcium phosphate, various sugars and types of starch, cellulose derivatives, gelatin, vegetable oils and polyethylene glycols.

[0134] Techniques for formulation and administration of drugs may be found in “Remington's Pharmaceutical Sciences,” Mack Publishing Co., Easton, Pa., latest edition, which is incorporated herein by reference.

[0135] Suitable routes of administration may, for example, include oral, rectal, transmucosal, especially transnasal, intestinal or parenteral delivery, including intramuscular, subcutaneous and intramedullary injections as well as intrathecal, direct intraventricular, intravenous, intaperitoneal, intranasal, or intraocular injections.

[0136] Alternately, one may administer the pharmaceutical composition in a local rather than systemic manner, for example, via injection of the pharmaceutical composition directly into a tissue region of a patient.

[0137] Pharmaceutical compositions of the present invention may be manufactured by processes well known in the art, e.g., by means of conventional mixing, dissolving, granulating, dragee-making, levigating, emulsifying, encapsulating, entrapping or lyophilizing processes.

[0138] Pharmaceutical compositions for use in accordance with the present invention thus may be formulated in conventional manner using one or more physiologically acceptable carriers comprising excipients and auxiliaries, which facilitate processing of the active ingredients into preparations which, can be used pharmaceutically. Proper formulation is dependent upon the route of administration chosen.

[0139] For injection, the active ingredients of the pharmaceutical composition may be formulated in aqueous solutions, preferably in physiologically compatible buffers such as Hank's solution, Ringer's solution, or physiological salt buffer. For transmucosal administration, penetrants appropriate to the barrier to be permeated are used in the formulation. Such penetrants are generally known in the art.

[0140] For oral administration, the pharmaceutical composition can be formulated readily by combining the active compounds with pharmaceutically acceptable carriers well known in the art. Such carriers enable the pharmaceutical composition to be formulated as tablets, pills, dragees, capsules, liquids, gels, syrups, slurries, suspensions and the like, for oral ingestion by a patient. Pharmacological preparations for oral use can be made using a solid excipient, optionally grinding the resulting mixture and processing the mixture of granules, after adding suitable auxiliaries if desired, to obtain tablets or dragee cores. Suitable excipients are, in particular, fillers such as sugars, including lactose, sucrose, mannitol, or sorbitol; cellulose preparations such as, for example, maize starch, wheat starch, rice starch, potato starch, gelatin, gum tragacanth, methyl cellulose, hydroxypropylmethyl-cellulose, sodium carbomethylcellulose; and/or physiologically acceptable polymers such as polyvinylpyrrolidone (PVP). If desired, disintegrating agents may be added, such as cross-linked polyvinyl pyrrolidone, agar, or alginic acid or a salt thereof such as sodium alginate.

[0141] Dragee cores are provided with suitable coatings. For this purpose, concentrated sugar solutions may be used which may optionally contain gum arabic, talc, polyvinyl pyrrolidone, carbopol gel, polyethylene glycol, titanium dioxide, lacquer solutions and suitable organic solvents or solvent mixtures. Dyestuffs or pigments may be added to the tablets or dragee coatings for identification or to characterize different combinations of active compound doses.

[0142] Pharmaceutical compositions which can be used orally, include push-fit capsules made of gelatin as well as soft, sealed capsules made of gelatin and a plasticizer, such as glycerol or sorbitol. The push-fit capsules may contain the active ingredients in admixture with filler such as lactose, binders such as starches, lubricants such as talc or magnesium stearate and, optionally, stabilizers. In soft capsules, the active ingredients may be dissolved or suspended in suitable liquids, such as fatty oils, liquid paraffin, or liquid polyethylene glycols. In addition, stabilizers may be added. All formulations for oral administration should be in dosages suitable for the chosen route of administration.

[0143] For buccal administration, the compositions may take the form of tablets or lozenges formulated in conventional manner.

[0144] For administration by nasal inhalation, the active ingredients for use according to the present invention are conveniently delivered in the form of an aerosol spray presentation from a pressurized pack or a nebulizer with the use of a suitable propellant, e.g., dichlorodifluoromethane, trichlorofluoromethane, dichloro-tetrafluoroethane or carbon dioxide. In the case of a pressurized aerosol, the dosage unit may be determined by providing a valve to deliver a metered amount. Capsules and cartridges of, e.g., gelatin for use in a dispenser may be formulated containing a powder mix of the compound and a suitable powder base such as lactose or starch.

[0145] The pharmaceutical composition described herein may be formulated for parenteral administration, e.g., by bolus injection or continuous infusion. Formulations for injection may be presented in unit dosage form, e.g., in ampoules or in multidose containers with optionally, an added preservative. The compositions may be suspensions, solutions or emulsions in oily or aqueous vehicles and may contain formulatory agents such as suspending, stabilizing and/or dispersing agents.

[0146] Pharmaceutical compositions for parenteral administration include aqueous solutions of the active preparation in water-soluble form. Additionally, suspensions of the active ingredients may be prepared as appropriate oily or water based injection suspensions. Suitable lipophilic solvents or vehicles include fatty oils such as sesame oil, or synthetic fatty acids esters such as ethyl oleate, triglycerides or liposomes. Aqueous injection suspensions may contain substances, which increase the viscosity of the suspension, such as sodium carboxymethyl cellulose, sorbitol or dextran. Optionally, the suspension may also contain suitable stabilizers or agents which increase the solubility of the active ingredients to allow for the preparation of highly concentrated solutions.

[0147] Alternatively, the active ingredient may be in powder form for constitution with a suitable vehicle, e.g., sterile, pyrogen-free water based solution, before use.

[0148] The pharmaceutical composition of the present invention may also be formulated in rectal compositions such as suppositories or retention enemas, using, e.g., conventional suppository bases such as cocoa butter or other glycerides.

[0149] Pharmaceutical compositions suitable for use in context of the present invention include compositions wherein the active ingredients are contained in an amount effective to achieve the intended purpose. More specifically, a therapeutically effective amount means an amount of active ingredients (i.e., the polynucleotide, polypeptide, peptide or cells expressing and/or secreting same) effective to prevent, alleviate or ameliorate symptoms of a disorder (e.g., amyloid fibril—related disease or disorder) or prolong the survival of the subject being treated.

[0150] Determination of a therapeutically effective amount is well within the capability of those skilled in the art, especially in light of the detailed disclosure provided herein.

[0151] For any preparation used in the methods of the invention, the therapeutically effective amount or dose can be estimated initially from in vitro and cell culture assays. For example, a dose can be formulated in animal models to achieve a desired concentration or titer. Such information can be used to more accurately determine useful doses in humans.

[0152] Toxicity and therapeutic efficacy of the active ingredients described herein can be determined by standard pharmaceutical procedures in vitro, in cell cultures or experimental animals. The data obtained from these in vitro and cell culture assays and animal studies can be used in formulating a range of dosage for use in human. The dosage may vary depending upon the dosage form employed and the route of administration utilized. The exact formulation, route of administration and dosage can be chosen by the individual physician in view of the patient's condition. (See e.g., Fingl, et al., 1975, in “The Pharmacological Basis of Therapeutics”, Ch. 1 p. 1).

[0153] Dosage amount and interval may be adjusted individually to provide tissue levels (e.g., plasma or brain) of the active ingredient are sufficient to prevent amyloid fibril formation (minimal effective concentration, MEC). The MEC will vary for each preparation, but can be estimated from in vitro data. Dosages necessary to achieve the MEC will depend on individual characteristics and route of administration. Detection assays can be used to determine plasma concentrations.

[0154] Depending on the severity and responsiveness of the condition to be treated, dosing can be of a single or a plurality of administrations, with course of treatment lasting from several days to several weeks or until cure is effected or diminution of the disease state is achieved.

[0155] The amount of a composition to be administered will, of course, be dependent on the subject being treated, the severity of the affliction, the manner of administration, the judgment of the prescribing physician, etc.

[0156] Compositions of the present invention may, if desired, be presented in a pack or dispenser device, such as an FDA approved kit, which may contain one or more unit dosage forms containing the active ingredient. The pack may, for example, comprise metal or plastic foil, such as a blister pack. The pack or dispenser device may be accompanied by instructions for administration. The pack or dispenser may also be accommodated by a notice associated with the container in a form prescribed by a governmental agency regulating the manufacture, use or sale of pharmaceuticals, which notice is reflective of approval by the agency of the form of the compositions or human or veterinary administration. Such notice, for example, may be of labeling approved by the U.S. Food and Drug Administration for prescription drugs or of an approved product insert. Compositions comprising a preparation of the invention formulated in a compatible pharmaceutical carrier may also be prepared, placed in an appropriate container and labeled for treatment of an indicated condition, as if further detailed above.

[0157] While further reducing the present invention to practice, the present inventors have uncovered that BChE can be used to reduce the acetylcholine—mediated control over inflammatory reactions.

[0158] As is shown in Table 8 and described in Example 2 of the Examples section which follows, BCHE, the soluble cholinesterase, is more accessible to circulating ACh than ACHE. In addition, under high concentrations of ACh, BChE's capacity to hydrolyze ACh is only 12-fold lower than that of ACHE. Nevertheless, BCHE constitutes only 10% of the circulation capacity to hydrolyze Ach. Therefore, the present inventors have uncovered that BChE administration shall not increase the inflammatory load, opposite to the case of ACHE administration, which reduces ACh drastically, relieving the blockade over the synthesis by macrophages of pro-inflammatory cytokines (Tracey, 2002). Thus, BChE but not ACHE is predicted to avoid the cholinergic-mediated inflammatory reaction.

[0159] Hence, according to an additional aspect of the present invention there is provided a method of limiting or reducing an inflammatory reaction in an individual treated with a cholinesterase. The method according to this aspect of the invention comprises increasing an expression level and/or activity of BChE in the individual, avoiding the risk of inflammatory reaction in the individual. This method may find particular use in treating the inflammatory reactions mediated by circulating organophosphate insecticides or chemical warfare agents, which are oftentimes associated with individuals subjected to occupational or wartime exposure of such agents. To a certain extent, BChE should be viewed as a balancer of the cholinergic status in the peripheral circulation. Because inflammation is conceived as a contributor to numerous neurodegenerative diseases, its capacity to maintain a neutral inflammatory load is an important virtue under conditions requiring prolonged treatment.

[0160] Such inflammatory reactions are typically mediated by at least one pro-inflammatory cytokine selected from the group consisting of IL-1, IL-1α, IL-1β, IL-1ss, IL-6, IL-8, IL-10, IL-12, IL-18 and TNFα secreted by cells participating in the inflammatory reactions, e.g., neutrophils, monocytes and eosinophils, or by tissue residing macrophages (Borovikova et al., 2000, Wang et al, 2003).

[0161] Increasing the expression level and/or activity of BChE in the individual according to this aspect of the present invention is effected by at least one approach selected from the group consisting of (a) expressing in cells of the individual an exogenous polynucleotide encoding at least a functional portion of BCHE; (b) increasing expression of endogenous BChE in the individual; (c) increasing endogenous BChE activity in the individual; (d) administering an exogenous polypeptide including at least a functional portion of BChE to the individual; and (g) administering BChE expressing cells into the individual. Each one of these approaches is described in greater detail hereinabove.|

[0162] The phrase “functional portion” as used herein refers to a part of the BCHE protein (i.e., a polypeptide) which exhibits functional properties of the enzyme such as binding to its substrate. According to preferred embodiments of the present invention the functional portion of BChE is a polypeptide sequence including amino 29-602 (mature BChE protein), optionally, amino acids 1-602 as set forth in SEQ ID NO:2.

[0163] Examples of diseases and disorders associated with inflammatory reactions include, but are not limited to, Alzheimer's disease (Nikolov R, 1998, Drug News Perspect. 11: 248-55), sepsis (Wang H, et al., 2004, Nat. Med. 10: 1216-21. Epub 2004 Oct. 24), asthma and chronic obstructive pulmonary disease (COPD) (Gosens R, et al., 2004, Eur. J. Pharmacol. 500: 193-201), rheumatoid arthritis (RA) (Hansel S, et al., 2003, Atherosclerosis. 170: 177-80), Inflammatory bowel disease (e.g., Crohn's disease, ulcerative colitis) (Hatoum O A, et al., 2003, Gastroenterology. 125: 58-69), Sjogren's syndrome (SS) (Borchers A T, et al., 2003, Clin. Rev. Allergy Immunol. 25: 89-104), acute systemic inflammation (Chia S, et al., 2003, J. Am. Coll. Cardiol. 41: 333-9), chronic inflammatory disease, tuberculosis, skin and lung abscesses. All these diseases and disorders can be treated using BChE as an anti-inflammatory agent.

[0164] Additional objects, advantages and novel features of the present invention will become apparent to one ordinarily skilled in the art upon examination of the following examples, which are not intended to be limiting. Additionally, each of the various embodiments and aspects of the present invention as delineated hereinabove and as claimed in the claims section below finds experimental support in the following examples.

### EXAMPLES

[0165] Reference is now made to the following examples, which together with the above descriptions, illustrate the invention in a non limiting fashion.

[0166] Generally, the nomenclature used herein and the laboratory procedures utilized in the present invention include molecular, biochemical, microbiological and recombinant DNA techniques. Such techniques are thoroughly explained in the literature. See, for example, “Molecular Cloning: A laboratory Manual” Sambrook et al., (1989); “Current Protocols in Molecular Biology” Volumes I-III Ausubel, R. M., Ed. (1994); Ausubel et al., “Current Protocols in Molecular Biology”, John Wiley and Sons, Baltimore, Md. (1989); Perbal, “A Practical Guide to Molecular Cloning”, John Wiley & Sons, New York (1988); Watson et al., “Recombinant DNA”, Scientific American Books, New York; Birren et al. (Eds.) “Genome Analysis: A Laboratory Manual Series”, Vols. 1-4, Cold Spring Harbor Laboratory Press, New York (1998); methodologies as set forth in U.S. Pat. Nos. 4,666,828; 4,683,202; 4,801,531; 5,192,659 and 5,272,057; “Cell Biology: A Laboratory Handbook”, Volumes I-III Cellis, J. E., Ed. (1994); “Culture of Animal Cells—A Manual of Basic Technique” by Freshney, Wiley-Liss, N.Y. (1994), Third Edition; “Current Protocols in Immunology” Volumes I-III Coligan J. E., Ed. (1994); Stites et al. (Eds.), “Basic and Clinical Immunology” (8th Edition), Appleton & Lange, Norwalk, Conn. (1994); Mishell and Shiigi (Eds.), “Selected Methods in Cellular Immunology”, W. H. Freeman and Co., New York (1980); available immunoassays are extensively described in the patent and scientific literature, see, for example, U.S. Pat. Nos. 3,791,932; 3,839,153; 3,850,752; 3,850,578; 3,853,987; 3,867,517; 3,879,262; 3,901,654; 3,935,074; 3,984,533; 3,996,345; 4,034,074; 4,098,876; 4,879,219; 5,011,771 and 5,281,521; “Oligonucleotide Synthesis” Gait, M. J., Ed. (1984); “Nucleic Acid Hybridization” Hames, B. D. and Higgins S. J., Eds. (1985); “Transcription and Translation” Hames, B. D. and Higgins S. J., Eds. (1984); “Animal Cell Culture” Freshney, R. I., Ed. (1986); “Immobilized Cells and Enzymes” IRL Press, (1986); “A Practical Guide to Molecular Cloning” Perbal, B., (1984) and “Methods in Enzymology” Vol. 1-317, Academic Press; “PCR Protocols: A Guide To Methods And Applications”, Academic Press, San Diego, Calif. (1990); Marshak et al., “Strategies for Protein Purification and Characterization—A Laboratory Course Manual” CSHL Press (1996); all of which are incorporated by reference as if fully set forth herein. Other general references are provided throughout this document. The procedures therein are believed to be well known in the art and are provided for the convenience of the reader. All the information contained therein is incorporated herein by reference.

### Materials and Experimental Methods

[0167] Synthetic peptides—The AChE-S C-terminal (ASP) and the BChE C-terminal (BSP) peptides were synthesized at the noted lengths, using a Pioneer peptide synthesizer (Perspective, Cambridge, UK), purified and analyzed by MALDI-TOFF mass spectrometry as previously described (Grisaru et al., 2001) according to the C-terminal sequences of human ACHE and BCHE, respectively (Glick, 2003). Purity was confirmed by mass spectrometry and was found to be >90%. BSP41 (SEQ ID NO:1) is composed of residues 562-602 in hBChE (SwissProt Accession No. P06276; SEQ ID NO:2). ASP23 (SEQ ID NO:3), ASP40 (SEQ ID NO:4) and ASP63 (SEQ ID NO:5) mimic residues 592-614, 575-614 and 548-610, respectively in hAChE (GenBank Accession No. P22303; SEQ ID NO:6). For peptide sequences and homology see FIG. 3a.

[0168] Enzymes—Purified human BChE (from human serun; Sigma, Jerusalem, Israel) and recombinant human ACHE-S, prepared from an ACHE cDNA clone (Soreq et al., 1990) as detailed in Velan et al., 1991 (Sigma, Jerusalem, Israel). Enzyme integrity was verified by measuring the hydrolysis rate of acetyl- or butyrylthiocholine, respectively (Ellman et al., 1961), compared to the protein concentration.

[0169] In vitro formation of amyloidfibril—In vitro formation of amyloid fibril was in the presence of the synthetic Aβ (1-40) peptide (Biosource, Camarillo, Calif., USA) as a precursor. The reporter molecule was Thioflavin T (ThT) (Sigma, Cat. No. T-3516, Jerusalem, Israel), a benzothiazole dye that undergoes a shift in its excitation spectrum (from 340 nm to 450 nm) when interacting with β-sheet amyloid structures. The resultant ThT fluorescence signal is proportional to the amount of amyloid formed (LeVine, 1993). A stock solution of Aβ in dimethylsulfoxide (DMSO) was diluted with phosphate-buffered saline (PBS) containing 0.02% Na-Azid to a final concentration of 162 μM and 20 μl of the diluted Aβ solution was placed in each well of a 96 multiwell plate (Nunc, Roskilde, Denmark). After 20 minutes of pre-incubation at room temperature of the Aβ samples (20 μl), 80 μl of 1.25 μM ThT in 50 mM glycine buffer, pH 8.5, was added. Incubation was with shaking at 200 rpm for 6 to 8 hours at the noted temperatures. Fluorescence was measured continuously or at 30-40 minute intervals, using a Spectro-fluorometer (Tecan, Maennedorf, Switzerland). Excitation and emission wavelengths were 450 nm and 485 nm, respectively. Enhancement of the fibrillation process by the different combinations of water-dissolved cholinesterases and peptides mimicking fragments thereof, was evaluated by dissecting the time curves into two stages: the lag before the onset of the fluorescence increase (the nucleation process) and the average rate of fluorescence increase at several time points (rate of fibrils formation). Statistics analysis was performed using the Kaleidagraph Software (Reading, Pa., USA).

[0170] Circular Dichroism (CD) measurements—For circular dichroism (CD) measurements, ASP peptides were dissolved in double distilled water (DDW) to a final concentration of 1×10⁻⁴ M. To reach this concentration, as required for the CD measurements, BSP had to be dissolved in 1,1,1,3,3,3-hexafluoro-2-propanol (HFIP). Direct CD spectra were recorded at room temperature using a CD Jasco J-810 Spectropolarimeter (Easton, Md., USA) with a 1 mm path length cell. Recordings were at 0.5 nm intervals in the spectral range 185-260 nm.

[0171] Peptide modeling—Peptide modeling involved virtual construction of the analyzed peptides using the interface of the Deep View spdbv 3.7 software (Glaxo Smith Kline, Bredford, UK) followed by distance geometry minimization. Figures were created with the PyMol software (DeLano Scientific LLS, San Carlos, Calif., USA). Helical Wheel Projections were done by wheel. PI, Version 0.10 (Cell Biology and Neuroscience, UC Riverside, Calif., USA).

[0172] BChE biochemistry—Serum cholinesterase catalytic activity measurements are based on a spectrophotometric method adapted to a microtiter plate assay. Butyrylthiocholine (BTCh, Sigma) hydrolysis rates are measured following 20 minutes incubation with 5×10⁻⁵ M tetraisopropyl pyrophosphoramide (iso-OMPA, Sigma), a specific BChE inhibitor or 10⁻⁵ M 1,5-bis(4-allyldimethylammoniumphenyl) pentan-30-one dibromide (BW284c51, Sigma, A9013), a specific AChE inhibitor. Addition of both inhibitors reduces hydrolysis to the rate of spontaneous hydrolysis measured in control reactions lacking enzyme or substrate, attesting to the specificity of these serum activities. Readings at 405 nm are repeated at 2-minute intervals for 20 minutes. Non-enzymatic hydrolysis of substrate is subtracted from the total rate of hydrolysis. Enzyme activity is calculated using the molar extinction coefficient for 5-thio-2-nitrobenzoate [13,600 M⁻¹×cm⁻¹] [Ellman, G. L. et al. (1961) Biochem. Pharmacol. 7:88-95].

[0173] MPTP poisoning of mice—After its accidental discovery in the early 1980s, 1-methyl-4-phenyl-1,2,3,6-tetrahydropyridine (MPTP) has been shown to induce Parkinsonism in monkeys and Parkinson-like symptoms in mice, both at the behavioral and the anatomical level. Thus, MPTP has been used extensively as a model for Parkinson's disease in non-human primates and mice (Predborzski et al. (2000) Restorative Neurology and Neuroscience 16:135-142). To induce Parkinson-like symptoms each mouse is injected with a 0.01 ml of an MPTP solution (2 mg/ml) per gram mouse weight (e.g. a 20 gram mouse receives 0.2 ml).

[0174] Telemetric follow-up of behavior—Battery operated biotelemetric transmitters (model VM-FH, Mini Mitter, Sun River, Oreg., USA) are implanted in the peritoneal cavity under ether anesthesia 12 days prior to the test. After implantation, mice are housed in separate cages with free access to food and water. Output is monitored by a receiver board (model RA-1010, Mini Mitter) placed under each animal's cage and fed into a peripheral processor (BCM 100) connected to a desktop computer. Locomotor activity after the dark/light shift is measured by detecting changes in signal strength as animals move about in their cages, so that the number of pulses generated by the transmitter is proportional to the distance the animal moves. The cumulative number of pulses generated over the noted periods is recorded [Yirmiya, R. et al. (1997) Brain Res. 749: 71-81]. Recording lasts 24 consecutive hours, starting at 9:30 am, with the light phase of a 12:12 hour dark/light cycle beginning at 7:00 am. To initiate a day/night switch, the dark/light periods are reversed and recording starts 72 hours after the switch and lasts 24 hours. Recording proceeds for an additional 3 hours after injection of active agents.

### Example 1

### BChE Inhibits Aβ Fibril Formation

[0175] The progressive deposition of amyloid β peptide (Aβ) in fibrillar form is a key feature in the development of the pathology in Alzheimer's disease. ACHE is found associated with amyloid plaque deposits [Urlich, J. et al. (1990) Acta Neuropathol. (Berl.) 80(6):624-8]. In addition, in vitro studies demonstrated that ACHE promotes the assembly of Aβ peptide into amyloid fibrils [Alvarez et al. (1995) Neurosci. Lett. 201(1): 49-52; Inestrosa et al. (1996a); Inestrosa et al. (1996b); Alvarez et al. (1998)]. The fluorogenic incorporation of Thioflavin T into Aβ fibrils essentially measures the shift from an amorphic, unstructured polypeptide into a tight network of β-pleated sheets which initiates the formation of the amyloid plaques.

[0176] In vitro Aβ fibrils form spontaneously, provided that the peptide is present at the certain critical concentration. At undisturbed conditions the fibrils are formed in the time span of days (2-7 days) but this process can be considerably accelerated by shaking the solution. The fibril formation can be followed by the measurements of: (1) turbidity of the solution, (2) staining with diazobenzidine sulfonate dye, Congo Red, or by (3) staining with benzothiazole dye, Thioflavin T (ThT). The latter may be added at the end of the procedure, or, alternatively, at the beginning in which case it provides a real-time follow-up of fibril formation.

[0177] The inventors were able to follow the Aβ fibrils generation, in vitro, using all the above mentioned methods, with a preference for real-time ThT fluorescence measurements, as the most sensitive and reproducible method.

[0178] Experimental Results

[0179] BChE attenuates amyloid fibrils formation—Amyloid fibril (Aβ) formation was quantified by measuring changes in ThT fluorescence. As predicted, Aβ fibrils were spontaneously formed in vitro provided that the Aβ peptide was present above 5 μM. FIGS. 1a-e present the outcome of characteristic experiments, demonstrating the kinetics of amyloid β sheets formation from Aβ [1-40] peptide at a concentration of 33 μM. Reactions were performed in the absence or presence of increasing concentrations of purified human BChE (SEQ ID NO:2; FIG. 1a), recombinant ACHE-S (SEQ ID NO:6; FIG. 1b) or both (FIGS. 1c and d). At the general range of 1:100 ratio of BChE to Aβ, purified BChE surprisingly prolonged the lag and reduced the apparent rate of amyloid formation. Due to the complex kinetics of the fibril formation process the apparent rate of change in ThT fluorescence was repeatedly determined during the exponential phase of increase in its signal (at 390±20 minutes). This measurement resulted in a dose-dependent suppression pattern, to the extent that addition of 0.4 μM BChE to 33 μM Aβ totally prevented fibril formation for over 600 minutes (FIG. 1a). In contrast, addition of similar doses of AChE to Aβ, predictably shortened by half the lag time prior to fibril formation, again in a dose dependent manner (FIG. 1e). The lag period therefore decreased from 240 minutes to 150 minutes and the maximal rate of fibril formation increased from 0.057 to 0.116 fluorescence units (FU)/min for Aβ alone as compared to Aβ in the presence of 0.36 μM AChE-S (FIG. 1b and Table 7, hereinbelow). When increasing doses of hBChE were added to a combined mix of 33 μM Aβ with 0.36 μM AChE-S, a dose-dependent interference with the fibril formation process was observed (FIG. 1c and 2a). Thus, BChE is capable of reducing the rate of fibrillation of Aβ alone, or Aβ which is formed in the presence of AChE.

TABLE 7
Reproducibility and significance of the modified fibrillation effects

| | | | | | Rate | | |
|---|---|---|---|---|---|---|---|
| | | Concentration | | Rate | (fold | Lag | Lag (fold |
| | n | (mg/L) | M.W. | (FU/h) | change) | (h) | change) |
| 1. No addition | 22 | — | — | 3.4 ± 0.4 | — | 4.0 ± 0.3 | — |
| 2. AChE-S | 16 | 25.8 | 64575.1 | 7.0 ± 1.3 | 2.1* | 2.5 ± 0.3 | 0.6* |
| 3. ASP23 | 9 | 1.2 | 2875.1 | 4.0 ± 1.1 | 1.2 | 4.5 ± 0.7 | 1.1 |
| 4. ASP40 | 8 | 2.0 | 5074.5 | 2.7 ± 1.0 | 0.8 | 4.4 ± 0.5 | 1.1 |
| 5. ASP63 | 8 | 3.1 | 7752.7 | 2.4 ± 0.6 | 0.7 | 5.9 ± 0.9 | 1.5 |
| 6. BChE | 12 | 27.4 | 68418.1 | 1.1 ± 0.3 | 0.3* | 5.6 ± 0.5 | 1.4* |
| 7. BSP41 | 6 | 2.0 | 5029.5 | 1.5 ± 0.6 | 0.4* | >7.5 | >1.9* |

Table 7: Aβ fibrillation was characterized as detailed under Methods, for the noted No. of repetitions (n) in each case. Lag and rate values are expressed as mean ± Standard Error (SE). Statistically significant differences from control (No addition) are marked by asterisks. h = hours; Note the different time scale (h).

[0180] Altogether, as is schematically illustrated in FIG. 2b, BChE exhibits an inhibitory effect on amyloid fibril formation and thus counteracts the acceleration effect formed by ACHE.

[0181] BSP attenuates fibril formation—In an attempt to identify the region(s) within the BChE molecule which are responsible for interfering with Aβ fibrillation, homologous peptides corresponding to the C-terminal domains of BChE and AChE-S were synthesized and their effect on amyloid fibrils formation was examined. FIG. 3a presents the analyzed sequences and demonstrates the significant homology between them. As is shown in FIGS. 3b and c, the 41-amino acid long BSP41 peptide (SEQ ID NO:1) was capable of interfering with Aβ fibrillation in a dose dependent manner and in similar molar ratios as with BChE (FIG. 3b-c). Moreover, as is seen in Table 7 hereinabove, absolute dose calculations revealed that the BSP41 peptide was even more potent in interfering with Aβ fibrillation than the complete BChE enzyme since only 2 μg/ml BSP peptide were needed for a complete attenuation of Aβ fibrillation (for 400 minutes) as compared with 30 μg/ml of the complete BChE enzyme.

[0182] ASP peptides do not activate or inhibit Aβ fibrillation—In contrast to BSP41, the 40-amino acid long ASP40 peptide (SEQ ID NO:4) mimicking the corresponding domain in AChE-S failed to show any significant capacity to activate or inhibit fibrillation (FIG. 3c). Similar experiments utilizing the two additional peptides as putative modifiers of Aβ fibril formation: ASP63 (SEQ ID NO:5), a longer version of the ACHE-S C-terminus and ASP23 (SEQ ID NO:3), a shorter 23-amino acid long ACHE-S C-terminus peptide, resulted in no significant effect on amyloid formation (FIG. 3c). These results demonstrate that the entire C-terminal domain in AChE-S is unlikely involved in the Aβ fibrillation process; serving as a negative control, these findings further provide a proof of the specificity of the PSP41 effect.

[0183] It is worth mentioning, that in both ACHE and BChE, the C-terminus is positioned far away from the Peripheral Anionic binding Site (PAS) domain which is considered by many investigators to be causally involved in Aβ fibrillation (De Ferrari G V, et al., 2001, Biochemistry. 40: 10447-57). FIG. 3d presents the cholinesterase structure, demonstrating these physical distances.

[0184] Molecular modeling points at putative structural differences between BSP and ASP—In search for structural differences between the BSP and ASP peptides, the circular dichroism (CD) properties of the synthesized series of BSP and ASP peptides were determined (FIG. 4). Due to difficulties to solubilize BSP in water up to the concentrations required for CD tests, HFIP was used as a solvent. Molar elipticity measurements for BSP41, ASP40 and ASP63 all showed a clear positive band at 192 nm and a negative band at 209 nm, characteristic of a helical structures. The helical features observed for ASP40 are in line with reports of others (Cottingham et al., 2003). ASP23 showed, however, a clear negative band at 195 nm, characteristic of a random coil structure.

[0185] To further pursue the structural basis for the functional differences between ASP and BSP, the structures of the ASP40 and BSP41 peptides were modeled (FIGS. 5a-e). Both peptides emerged as symmetric amphipathic helices with similar distributions of polar and non-polar residues. However, BSP's amphipathicity appeared to be locally disturbed by a protruding aromatic trytophane residue in the polar side of the helix. Further studies will be required to find out if this local structural difference between the ASP and BSP peptides is the cause of asymmetry and functional differences.

[0186] Altogether these results demonstrate that BChE, in a molar ratio of 1:100 to the Aβ peptide, is efficiently capable of slowing down the fibrillogenic process; BChE was found to retard the onset of fluorogenic increase and reduce the rate of that increase, once initiated. Moreover, when added to Aβ together with ACHE, BChE is capable of delaying the onset and reducing the rate of fibril formation in a dose-dependent manner. In addition, BSP, a peptide mimicking the C-terminus of BChE, was found to be highly potent in inhibiting Aβ fibril formation. Thus, the BSP peptide, at a concentration as low as 2 μg/ml was capable of suppressing Aβ fibril formation for as long as 400 minutes, similar to the effect obtained using 30 μg/ml of the complete BChE enzyme (Table 7, hereinabove).

[0187] These results suggest the use of BChE and/or peptide derived thereof as novel therapeutic agents useful for treating diseases associated with fibrils formation and deposition such as Alzheimer's disease (AD).

[0188] Discussion

[0189] By following amyloid formation with time (rate determination), rather than measuring the final yield of the fibrillation process the present inventors were able to show that BChE prolongs the lag and reduces the rate of amyloid fibrils formation in vitro. Others observed that BChE does not enhance the fibrillation process, but interpreted that to imply no involvement (Inestrosa et al., 1996b). The present study, however, demonstrated that contrary to this early prediction, BChE acts as a negative modifier in this process and that it likely does that through the action of its C-terminal peptide, BSP.

[0190] The capacity of BChE and BSP to suppress amyloid fibril formation was observed both at the nucleation and the progression phases of the fibrillation process and was dose-dependent, a mirror image of the facilitation observed with recombinant, highly purified hAChE-S. Importantly, a corresponding series of peptides designed to mimic increasingly long C-terminal regions of AChE-S failed to affect the fibrillation process and showed neither facilitation nor suppression of amyloid fibrils formation. This, in turn, suggests that the fibrillation enhancement conferred by AChE-S does not involve the C-terminal domain of this enzyme, compatible with suggestions that it is induced by the peripheral anionic site (PAS,) (Inestrosa et al., 1996a).

[0191] BSP41, the 41-amino acids long peptide representing the C-terminus of BChE, showed solubility differences when compared to ASP40. BSP, but not ASP, further induced effective suppression of the fibrillation process, as potent as that of the inhibitory effect of intact BChE. This supports the hypothesis that BSP by itself is the cause for BChE's modifying effect of the Aβ fibril formation process. The secondary structure of the synthetic peptides employed and which mimic the C-terminal peptides of AChE-S and BChE, obviously depends on the length of the specific peptide tested. The ASP63 and ASP40 residue peptides are α-helical, whereas the shorter ASP23 shows a random coil structure. However, none of the ASP23, ASP40, ASP63 peptides could by themselves facilitate Aβ fibrillation. That ASP shares some sequence homology with the Aβ peptide (Cottingham et al., 2002; Greenfield and Vaux, 2002) thus appears irrelevant to the phenomenon observed in the present study. Thus, without being bound with any theory it is likely that AChE-S promotes fibrillation via its PAS domain (Inestrosa et al., 1996b), whereas BChE's C-terminal peptide actively interferes with this process, most likely, by heterologous hydrophobic interaction.

[0192] The solubility differences, CD properties and structural features observed for BSP and ASP are all compatible with the hypothesis that the difference in the effects may reside in their distinct amphipatic characteristics. While the ASP40 peptide shows a clear division between hydrophobic and hydrophilic moieties, in BSP such a clear division appears impossible. Site-directed mutagenesis may be used to test if the hydrophobicity properties of BSP enable binding to AD pre-fibrils and control the attenuation of the fibrillation process.

[0193] The BChE K variant, representing a single C-terminal substitution (A539T) shows 30% reduction in hydrolytic activity (Bartels et al., 1992). This allele occurs with relatively high incidence (12% of the Caucasian population), which allowed testing its incidence in AD patients. Intriguingly, some (Lehmann et al., 1997; Lehmann et al., 2000) but not others (Brindle et al., 1998) reported association of this variant with an increased risk of late-onset AD. While this increased risk was tentatively attributed to the reduced hydrolytic activity of the K variant, the possibility of Aβ fibrillation effect should be explored.

[0194] The AChE-S protein facilitates Aβ fibrillation both in vitro and in vivo (Inestrosa et al., 1996a; Inestrosa et al., 1996b; Munoz and Inestrosa, 1999). Based on this precedence, it is tempting to speculate that BChE and BSP would also affect the Aβ fibrillation process in vivo, suggesting that the ratio between AChE-S and BChE may affect plaque formation. In the human brain, ACHE mRNA is 20-fold more abundant than BChE mRNA (Soreq and Zakut, 1993). In human blood, however, BChE, at 50 nM is 3-fold more abundant than ACHE (Loewenstein-Lichtenstein et al., 1995). The present findings imply that this concentration is sub-optimal for attenuating Aβ fibrils formation. This, in turn, suggests a therapeutic use of BSP, a relatively short mimic of the C-terminal peptide of BCHE. BSP can by itself attenuate Aβ fibrillation in the low dose of 2 mg/L. In view of the theory that the Aβ fibrillation process involves continuous communication between the brain and the circulation (Basun et al., 2002), administration of BSP may be by injection, similar to erythropoietin or GM-CSF (Arndt et al., 2004; Zhang et al., 2005). An alternative option for BSP administration may be by constructing a BSP expression vector and using this vector for transfecting bone marrow cells for autologous transplantation, similar to the gene therapy protocols used for adenosine deaminase replacement (Aiuti et al., 2003; Herzog and Arruda, 2003). In either way, the disrupted blood-brain barrier of AD patients (see Soreq, 2002 for a recent review) predicts effective penetrance of this peptide into the brain. The role(s) and actions of BChE in the pathogenesis of Alzheimer's disease thus merit renewed attention.

### Example 2

### BChE Can be Used to Limit ACH-Mediated Inflammatory Response

[0195] In normal human serum, an average assay of 20 individuals yields 81±23 nmol butyrylthiocholine (BThCh) hydrolyzed/hr/μl serum (assayed at 2 mM BThCh). Out of the total ACh binding sites in the human blood, BChE provides 75% or 50 nM [Lowenstein et al. (1995) Mol. Cell. Biol. Hum. Dis. Ser. 5:307-49] and erythrocytes ACHE—25%, or 10 nM [Ott et al. (1982) FEBS Lett. 138(2): 187-9]. However, the capacity of ACHE to degrade ACh decreases above 3 mM (which is defined as “substrate inhibition”). In contrast, BChE's capacity to hydrolyze ACh increases under increased ACh concentration (“substrate activation”). Therefore, conditions of elevated ACh (i.e. acute stress injury or exposure to anticholinesterases both of which increase the risk of cognitive decline), should best be treated with BChE, because under such conditions AChE's hydrolytic activity will be impaired but BChE's will be facilitated.

[0196] An inflammatory reaction, for example, as a response to an injury, involves the production of pro-inflammatory cytokines (e.g., by tissue macrophages). Intriguingly, the neurotransmitter which controls such a process is acetylcholine (ACh) [Bernik, T. R. et al. (2002) J. Exp. Med. 195(6):781-8]. In both tissues and circulation, ACh levels are controlled by ACHE [Soreq, H. and Seidman, S. (2001) Nature Neurosci. Rev. 2:294-302]. Therefore, increased AChE can initiate inflammatory reactions because it reduces ACh levels and increases production of cytokines. However, while inflammatory reactions are apparently useful in the short range, they carry a significant long-range risk of neurodegenerative disease. For example, head injury induces the largest non-inherited risk of AD [Shohaini, E. et al. (2000) J. Mol. Med. 78:228-236]. Therefore, both therapeutic uses of recombinant ACHE and treating patients with anti-cholinesterases, which induce ACHE overproduction as a feedback response, carry an inherent risk of increasing the inflammatory load in treated patients.

[0197] Unlike AChE, BChE does not entail a risk of increasing the inflammatory load, since it is not part of the auto-regulatory feedback loop of injury-cytokine release-cholinergic imbalance. In addition, BChE is soluble and thus accessible to circulating ACh. Moreover, the substrate of preference of BChE is different than that of ACHE. Thus, over the range of substrate concentrations 0.1 to 25 mM, the ratio of hydrolysis of AThCh relative to BThCh differs between the enzymes (Table 8, hereinbelow).

TABLE 8
Rate of hydrolysis of AThCh/BThCh*

| Substrate (mM) | 0.1 | 25.0 |
|---|---|---|
| hSerum BChE | 0.45 | 0.20 |
| hRBC AChE | 120 | 7.2 |

Table 8: The ratio of hydrolysis of AThCh relative BThCh is presented for two substrate concentrations (0.1 and 25 mM). The results present the average of three experiments.

[0198] Thus, under normal condition and assuming low ACh levels and negligible soluble ACHE levels in the circulation, the total ACh hydrolyzing capacity will be divided as follows: 75% by BChE and 25% by ACHE, when the ratio is 3:1.

[0199] Based on the AThCh hydrolysis ratio differences of AChE:BChE [245-fold at 0.1 mM, Table 8, hereinabove], BChE capacity of ACh hydrolysis in the circulation will be ca. 80-fold lower than that of ACHE under normal circumstances. However, increased ACh levels (up to 10 mM, as is the concentration in synapses) will improve BChE capacity to hydrolyze ACh (as in 25 mM, the difference is 36-fold, or only 12-fold lower than ACHE, Table 8, hereinabove). Nevertheless, BChE administration shall not increase the inflammatory load, because even at these higher ACh concentrations BChE will only constitute 10% of the circulation capacity to hydrolyze ACh. The progressive age-dependent increase in inflammatory diseases should hence be attributed to the increase in circulation ACHE, not to BCHE. In addition, mice injected with paraoxon, the OP metabolite of parathion, show reduced locomotion and decreased body temperature (Coudray-Lucas C, et al., 1983, Acta Pharmacol Toxicol (Copenh). 52: 224-9; Beeri R, et al., 1995, Curr. Biol. 5: 1063-71).

[0200] Based on the above discussion, the present inventors have uncovered that injection of human recombinant BChE (hrBChE) will limit the inflammatory reaction and reduce production of pro-inflammatory cytokines. Thus, the present inventors suggest the use of BChE in preventing and/or limiting ACh-modulated inflammatory reactions. The prediction is that treatment with BChE will reduce ACh levels below the threshold inducing ACHE overproduction (as in Kaufer et al., 1998, Meshorer et al., 2002), thus avoiding the relief over macrophages capacity to produce pro-inflammatory cytokines.

### Example 3

### BChE Inhibits Amylin Fibrillation

[0201] Type II diabetes is associated with widespread amyloidosis of the pancreatic islet β-cell (for review see Hoppener J W, et al., 2000, N. Engl. J. Med. 343(6): 411-9). Although the presence of amyloid deposits in diabetes was first recorded over 100 years ago, the contribution to the pathogenesis of diabetes is only now being appreciated (Hoppener J W, et al., 2002, Mol. Cell. Endocrinol. 197(1-2): 205-12). The polypeptide core of these deposits has been independently identified as islet amyloid polypeptide (IAPP) or amylin. Recent work has shown that amylin amyloid formation is cytotoxic and diabetogenic [Hoppener, 2002 (Supra)].

[0202] To test the ability of BChE to prevent amylin amyloid fibril formation, the present inventors have tested the rate of amylin fibrillation (at a concentration of 20 μM) in the presence or absence of 0.24 μM BChE (purified from pooled human serum). As is shown in FIG. 6, BChE completely attenuated the formation of amylin fibrils for 100 minutes, and increased the lag time of amyloid fibril formation from 30 minutes to 110 minutes.

[0203] These results demonstrate the ability of BChE to inhibit amylin fibril formation and suggest the use of BChE as a therapeutic agent for the prevention of amylin amyloidosis and the treatment of type II diabetes.

[0204] To further test the capacity of BChE to prevent amylin amyloidosis in vivo, BChE can be administered into transgenic mice over-expressing huIAPP (amylin) in pancreatic islet β-cells (Soeller W C, et al., 1998, Diabetes, 47(5): 743-50) and the effect of BChE in prevention or reversal of amylin amyloidosis can be determined using histopathological and immunostaining analyses.

[0205] It is appreciated that certain features of the invention, which are, for clarity, described in the context of separate embodiments, may also be provided in combination in a single embodiment. Conversely, various features of the invention, which are, for brevity, described in the context of a single embodiment, may also be provided separately or in any suitable subcombination.

[0206] Although the invention has been described in conjunction with specific embodiments thereof, it is evident that many alternatives, modifications and variations will be apparent to those skilled in the art. Accordingly, it is intended to embrace all such alternatives, modifications and variations that fall within the spirit and broad scope of the appended claims. All publications, patents and patent applications mentioned in this specification are herein incorporated in their entirety by reference into the specification, to the same extent as if each individual publication, patent or patent application was specifically and individually indicated to be incorporated herein by reference. In addition, citation or identification of any reference in this application shall not be construed as an admission that such reference is available as prior art to the present invention.

### REFERENCES LISTED IN ALPHABETIC ORDER

### Additional References are Cited in the Text

[0207] 1. Aiuti, A., Ficara, F., Cattaneo, F., Bordignon, C. and Roncarolo, M. G. (2003) Gene therapy for adenosine deaminase deficiency. Curr Opin Allergy Clin Immunol 3: 461-466.
[0208] 2. Alvarez, A., Alarcon, R., Opazo, C., Campos, E. O., Munoz, F. J., Calderon, F. H., Dajas, F., Gentry, M. K., Doctor, B. P., De Mello, F. G. and Inestrosa, N. C. (1998) Stable complexes involving acetylcholinesterase and amyloid-beta peptide change the biochemical properties of the enzyme and increase the neurotoxicity of Alzheimer's fibrils. J Neurosci 18: 3213-3223.
[0209] 3. Arndt, U., Kaltwasser, J. P., Gottschalk, R., Hoelzer, D. and Moller, B. (2004) Correction of iron-deficient erythropoiesis in the treatment of anemia of chronic disease with recombinant human erythropoietin. Ann Hematol.
[0210] 4. Bartels, C. F., Jensen, F. S., Lockridge, O., van der Spek, A. F., Rubinstein, H. M., Lubrano, T. and La Du, B. N. (1992) DNA mutation associated with the human butyrylcholinesterase K-variant and its linkage to the atypical variant mutation and other polymorphic sites. Am J Hum Genet. 50: 1086-1103.
[0211] 5. Bartolini, M., Bertucci, C., Cavrini, V. and Andrisano, V. (2003) beta-Amyloid aggregation induced by human acetylcholinesterase: inhibition studies. Biochem Pharmacol 65: 407-416.
[0212] 6. Basun, H., Nilsberth, C., Eckman, C., Lannfelt, L. and Younkin, S. (2002) Plasma levels of Abeta42 and Abeta40 in Alzheimer patients during treatment with the acetylcholinesterase inhibitor tacrine. Dement Geriatr Cogn Disord 14: 156-160.
[0213] 7. Borovikova, L. V., Ivanova, S., Zhang, M., Yang, H., Botchkina, G. I., Watkins, L. R., Wang, H., Abumrad, N., Eaton, J. W., and Tracey, K. J. (2000) Vagus nerve stimulation attenuates the systemic inflammatory response to endotoxin. Nature 405: 458-462.
[0214] 8. Brindle, N., Song, Y., Rogaeva, E., Premkumar, S., Levesque, G., Yu, G., Ikeda, M., Nishimura, M., Paterson, A., Sorbi, S., Duara, R., Farrer, L. and St George-Hyslop, P. (1998) Analysis of the butyrylcholinesterase gene and nearby chromosome 3 markers in Alzheimer disease. Hum Mol Genet. 7: 933-935.
[0215] 9. Cottingham, M. G., Hollinshead, M. S. and Vaux, D. J. (2002) Amyloid fibril formation by a synthetic peptide from a region of human acetylcholinesterase that is homologous to the Alzheimer's amyloid-beta peptide. Biochemistry 41: 13539-13547.
[0216] 10. Cottingham, M. G., Voskuil, J. L. and Vaux, D. J. (2003) The intact human acetylcholinesterase C-terminal oligomerization domain is alpha-helical in situ and in isolation, but a shorter fragment forms beta-sheet-rich amyloid fibrils and protofibrillar oligomers. Biochemistry 42: 10863-10873.
[0217] 11. Darvesh, S., Hopkins, D. A. and Geula, C. (2003) Neurobiology of butyrylcholinesterase. Nat Rev Neurosci 4: 131-138.
[0218] 12. De Ferrari, G. V., Mallender, W. D., Inestrosa, N. C. and Rosenberry, T. L. (2001) Thioflavin T is a fluorescent probe of the acetylcholinesterase peripheral site that reveals conformational interactions between the peripheral and acylation sites. J Biol Chem 276: 23282-23287.
[0219] 13. Ellman, G. L., Courtney, D. andres, V. J. and Featherstone, R. M. (1961) A new and rapid colorimetric determination of acetylcholinesterase activity. Biochem. Pharmacol. 7: 88-95.
[0220] 14. Geula, C. and Mesulam, M. M. (1995) Cholinesterases and the pathology of Alzheimer disease. Alzheimer Dis Assoc Disord 9 Suppl 2: 23-28.
[0221] 15. Glick, D., Ben Moyal, L. and Soreq, H. (2003) Genetic variation in butyrylcholinesterase and the physiological consequences for acetylcholinesterase function. London: Martin Dunitz.
[0222] 16. Greenfield, S, and Vaux, D. J. (2002) Parkinson's disease, Alzheimer's disease and motor neurone disease: identifying a common mechanism. Neuroscience 113: 485-492.
[0223] 17. Grisaru, D., Deutsch, V., Shapira, M., Pick, M., Stemfeld, M., Melamed-Book, N., Kaufer, D., Galyam, N., Gait, M. J., Owen, D., Lessing, J. B., Eldor, A. and Soreq, H. (2001) ARP, a peptide derived from the stress-associated acetylcholinesterase variant, has hematopoietic growth promoting activities. Mol Med 7: 93-105.
[0224] 18. Herzog, R. W. and Arruda, V. R. (2003) Update on gene therapy for hereditary hematological disorders. Expert Rev Cardiovasc Ther 1: 215-232.
[0225] 19. Inestrosa, N. C., Alvarez, A. and Calderon, F. (1996a) Acetylcholinesterase is a senile plaque component that promotes assembly of amyloid beta-peptide into Alzheimer's filaments. Mol Psychiatry 1: 359-361.
[0226] 20. Inestrosa, N. C., Alvarez, A., Perez, C. A., Moreno, R. D., Vicente, M., Linker, C., Casanueva, O. I., Soto, C. and Gamido, J. (1996b) Acetylcholinesterase accelerates assembly of amyloid-beta-peptides into Alzheimer's fibrils: possible role of the peripheral site of the enzyme. Neuron 16: 881-891.
[0227] 21. Kaufer, D., Friedman, A., Seidman, S, and Soreq, H. (1998). Acute stress facilitates long-lasting changes in cholinergic gene expression. Nature 393, 373-377.
[0228] 22. Lambert, M. P., Barlow, A. K., Chromy, B. A., Edwards, C., Freed, R., Liosatos, M., Morgan, T. E., Rozovsky, I., Trommer, B., Viola, K. L., Wals, P., Zhang, C., Finch, C. E., Krafft, G. A. and Klein, W. L. (1998) Diffusible, nonfibrillar ligands derived from Abetal-42 are potent central nervous system neurotoxins. Proc Natl Acad Sci USA 95: 6448-6453.
[0229] 23. Lehmann, D. J., Johnston, C. and Smith, A. D. (1997) Synergy between the genes for butyrylcholinesterase K variant and apolipoprotein E4 in late-onset confirmed Alzheimer's disease. Hum Mol Genet. 6: 1933-1936.
[0230] 24. Lehmann, D. J., Nagy, Z., Litchfield, S., Borja, M. C. and Smith, A. D. (2000) Association of butyrylcholinesterase K variant with cholinesterase-positive neuritic plaques in the temporal cortex in late-onset Alzheimer's disease. Hum Genet. 106: 447-452.
[0231] 25. LeVine, H., 3rd (1993) Thioflavine T interaction with synthetic Alzheimer's disease beta-amyloid peptides: detection of amyloid aggregation in solution. Protein Sci 2: 404-410.
[0232] 26. Loewenstein-Lichtenstein, Y., Schwarz, M., Glick, D., Norgaard Pedersen, B., Zakut, H. and Soreq, H. (1995) Genetic predisposition to adverse consequences of anti-cholinesterases in ‘atypical’ BChE carriers. Nature Med 1: 1082-1085.
[0233] 27. Meshorer, E., Erb, C. Gazit, R., Pavlovsky, L., Kaufer, D., Glick, D., Friedman, A., Ben-Arie, N. and Soreq, H. (2002). Alternative splicing and neuritic mRNA translocation under long-term neuronal hypersensitivity. Science, 295, 508-512.
[0234] 28. Mesulam, M., Carson, K., Price, B. and Geula, C. (1992) Cholinesterases in the amyloid angiopathy of Alzheimer's disease. Ann Neurol 31: 565-569.
[0235] 29. Mesulam, M. M. and Geula, C. (1994) Butyrylcholinesterase reactivity differentiates the amyloid plaques of aging from those of dementia. Ann Neurol 36: 722-727.
[0236] 30. Mesulam, M. M., Guillozet, A., Shaw, P., Levey, A., Duysen, E. G. and Lockridge, O. (2002) Acetylcholinesterase knockouts establish central cholinergic pathways and can use butyrylcholinesterase to hydrolyze acetylcholine. Neuroscience 110: 627-639.
[0237] 31. Morel, N., Leroy, J., Ayon, A., Massoulie, J. and Bon, S. (2001) Acetylcholinesterase H and T dimers are associated through the same contact. Mutations at this interface interfere with the C-terminal T peptide, inducing degradation rather than secretion. J Biol Chem 276: 37379-37389.
[0238] 32. Munoz, F. J. and Inestrosa, N. C. (1999) Neurotoxicity of acetylcholinesterase amyloid beta-peptide aggregates is dependent on the type of Abeta peptide and the ACHE concentration present in the complexes. FEBS Lett 450: 205-209.
[0239] 33. Prody, C. A., Zevin-Sonkin, D., Gnatt, A., Goldberg, I. and Soreq, H. (1987) Isolation and characterization of full-length cDNA clones coding for cholinesterase from fetal human tissues. Proc. Natl. Acad. Sci. USA 84, 3555-3559.
[0240] 34. Rees, T., Hammond, P. I., Soreq, H., Younkin, S, and Brimijoin, S. (2003) Acetylcholinesterase promotes beta-amyloid plaques in cerebral cortex. Neurobiol Aging 24: 777-787.
[0241] 35. Rees, T. M. and Brimijoin, S. (2003) The role of acetylcholinesterase in the pathogenesis of Alzheimer's disease. Drugs Today (Barc) 39: 75-83.
[0242] 36. Rees, T. M., Berson, A., Sklan, E. H, Younkin, L., Younkin, S., Brimijoin and Soreq, H. (2005 in press) Memory deficits correlating with acetylcholinesterase splice shift and amyloid burden in doubly transgenic mice. Current Alzheimer Research.
[0243] 37. Selkoe, D. J. (1996) Amyloid beta-protein and the genetics of Alzheimer's disease. J Biol Chem 271: 18295-18298.
[0244] 38. Soreq, H., Ben-Aziz, R., Prody, C. A., Seidman, S., Gnatt, A., Neville, L., Lieman-Hurwitz, J., Lev-Lehman, E., Ginzberg, D., Lipidot-Lifson, Y. and Zakut, H. (1990) Molecular cloning and construction of the coding region for human acetylcholinesterase reveals a G+C-rich attenuating structure. Proc Natl Acad Sci USA 87: 9688-9692.
[0245] 39. Soreq, H. and Zakut, H. (1990) Amplification of butyrylcholinesterase and acetylcholinesterase genes in normal and tumor tissues: putative relationship to organophosphorous poisoning. Pharm Res 7: 1-7.
[0246] 40. Soreq, H., Kaufer, Daniela Glick, David Friedman, Alon (2002) The molecular biology of Blood Brain Barrier disruption under stress. In Brain Disease: Therapeutic Strategies and Repair. O. Abramsky, D. A., A Miller, G. Said (ed): Martin Dunitz, pp. 231-238.
[0247] 41. Soreq, H., Nudel, U., Salomon, R., Revel, M. and Littauer, U. Z. (1974) In vitro translation of polyadenylic acid-free rabbit globin messenger RNA. J. Mol. Biol. 88, 233-245.
[0248] 42. Sponne, I., Fifre, A., Drouet, B., Klein, C., Koziel, V., Pincon-Raymond, M., Olivier, J. L., Chambaz, J. and Pillot, T. (2003) Apoptotic neuronal cell death induced by the non-fibrillar amyloid-beta peptide proceeds through an early reactive oxygen species-dependent cytoskeleton perturbation. J Biol Chem 278: 3437-3445.
[0249] 43. Sussman, J. L., Harel, M., Frolow, F., Oefner, C., Goldman, A., Toker, L. and Silman, I. (1991) Atomic structure of acetylcholinesterase from Torpedo californica: a prototypic acetylcholine-binding protein. Science 253: 872-879.
[0250] 44. Tracey, K. J. (2002) The inflammatory reflex. Nature 420: 853-859.
[0251] 45. Velan, B., Kronman, C., Grosfeld, H., Leitner, M., Gozes, Y., Flashner, Y., Sery, T., Cohen, S., Ben-Aziz, R., Seidman, S, and et al. (1991) Recombinant human acetylcholinesterase is secreted from transiently transfected 293 cells as a soluble globular enzyme. Cell Mol Neurobiol 11: 143-156.
[0252] 46. Wang, H., Yu, M., Ochani, M., Amella, C. A., Tanovic, M., Susarla, S., Li, J. H., Yang, H., Ulloa, L., Al-Abed, Y., Czura, C. J., and Tracey, K. J. (2003) Nicotinic acetylcholine receptor alpha7 subunit is an essential regulator of inflammation. Nature 421: 384-388.
[0253] 47. Zhang, W. G., Liu, S. H., Cao, X. M., Cheng, Y. X., Ma, X. R., Yang, Y. and Wang, Y. L. (2005) A phase-I clinical trial of active immunotherapy for acute leukemia using inactivated autologous leukemia cells mixed with IL-2, GM-CSF and IL-6. Leuk Res 29: 3-9.

### CD-ROM CONTENT

[0254] The following lists the file content of a duplicate CD-ROM, which is enclosed herewith and filed with the application. These files are incorporated herein by reference and thus form a part of the filed application. File information is provided as: File name/bite size/date of creation/machine format/operating system.

CD-ROM1 (1 file):

[0255] 1. 28870 Seq List/6289 Kbytes/Jan. 9, 2005/NotePad/PC.

What is claimed is:

1. A BChE derived peptide capable of preventing and/or reversing amyloid fibril formation.

2. The BChE derived peptide of claim 1, selected from the group consisting of SEQ ID NOs:1 and 8-20302.

3. A pharmaceutical composition comprising as an active ingredient BChE or a BChE derived peptide, said peptide being capable of preventing and/or reversing amyloid fibril formation and a pharmaceutically acceptable carrier.

4. The pharmaceutical composition of claim 3, wherein said BChE derived peptide is selected from the group consisting of SEQ ID NOs:1 and 8-20302.

5. The pharmaceutical composition of claim 3, wherein said BChE derived peptide is set forth by SEQ ID NO:1.

6. The pharmaceutical composition of claim 3, wherein said active ingredient is formulated in a therapeutically effective amount providable at a dose range of 0.1-1000 micromol per kg body weight.

7. The pharmaceutical composition of claim 3, wherein said active ingredient is formulated in a therapeutically effective amount providable at a dose range of 1-100 micromol per kg body weight.

8. The pharmaceutical composition of claim 3, wherein said active ingredient is formulated in a therapeutically effective amount providable at a dose range of 5-50 micromol per kg body weight.

9. The pharmaceutical composition of claim 3, wherein said pharmaceutically acceptable carrier is selected for reducing an immugenicity of said peptide.

10. The pharmaceutical composition of claim 3, wherein said pharmaceutically acceptable carrier is selected for sustained release of said peptide.

11. A method of treating an individual having or being predisposed to a disease or disorder associated with amyloid fibril formation, the method comprising administering to the individual a therapeutically effective amount of BChE or BChE derived peptide, thereby treating the individual having or being predisposed to a disease or disorder associated with amyloid fibril formation.

12. The method of claim 11, wherein said BChE derived peptide is selected from the group consisting of SEQ ID NO:1 and 8-20302.

13. The method of claim 11, wherein said disease or disorder associated with amyloid fibril formation is selected from the group consisting of a neurodegenerative disease, a disorder associated with systemic amyloidosis, a disorder associated with localized amyloidosis, a prion disease and/or a polyglutamine disorder.

14. The method of claim 13, wherein said neurodegenerative disease is selected from the group consisting of Alzheimer's disease, Huntington's disease and Parkinson's disease.

15. The method of claim 13, wherein said disorder associated with systemic amyloidosis is selected from the group consisting of Multiple myeloma, Chronic inflammatory disease, Rheumatoid arthritis, Tuberculosis, Skin abscess, lung abscess, Cancer, Hodgkin's disease, Hemodialysis for chronic renal failure, Heredofamilial amyloidosis, Familial Mediterranean Fever and Familial amyloid polyneuropathy.

16. The method of claim 13, wherein said disorder associated with localized amyloidosis is selected from the group consisting of Senile cardiac amyloidosis, Senile cerebral amyloidosis, Endocrine tumors, Medullary carcinoma of thyroid, Type II diabetes and Pancreatic islets β-cells.

17. The method of claim 13, wherein said prion disease is selected from the group consisting of Creutzfeldt-Jakob disease (CJD), spongioform enchephalopathies (TSE's), mad cow disease, Gerstmann-Straussler-Scheinker disease (GSS) and Kuru.

18. The method of claim 13, wherein said polyglutamine disorder is selected from the group consisting of Huntington's disease (HD), Spinal and Bulbar Muscular Atrophy (SBMA), DentatoRubral and PallidoLuysian Atrophy (DRPLA), spinocerebellar ataxia type 1 (SCA1), spinocerebellar ataxia type 2 (SCA2), Spinocerebellar ataxia type-3 (SCA3; Machado-Joseph Disease), Spinocerebellar ataxia type 7 (SCA7) and Spinocerebellar ataxia type 17 (SCA17).

19. The method of claim 11, wherein said amyloid is a protein selected from the group consisting of Transthyretin, Amyloid beta protein, Procalcitonin, LAPP (Amylin), amyloid light chain (AL), non-immunoglobulin amyloid associated (AA), non-immunoglobulin amyloid associated serum precursor (SAA), α-synucleic protein, ataxin and huntingtin.

20. The method of claim 11, wherein said peptide is set forth by SEQ ID NO:1.

21. The method of claim 11, wherein said therapeutically effective amount is providable at a dose range of 0.1-1000 micromol per kg body weight.

22. The method of claim 11, wherein said therapeutically effective amount is providable at a dose range of 1-100 micromol per kg body weight.

23. The method of claim 11, wherein said therapeutically effective amount is providable at a dose range of 5-50 micromol per kg body weight.

24. A method of identifying a BChE derived peptide capable of preventing and/or reversing amyloid fibril formation comprising contacting the BChE derived peptide with an amyloid precursor protein and a β-sheet—responsive dye and measuring a fluorescence intensity resulting from said β-sheet—responsive dye prior to and following said contacting said BChE derived peptide with said amyloid precursor protein, wherein delayed or reduced increase in said fluorescence intensity following said contacting said BChE derived peptide with said amyloid precursor protein is indicative of an ability of the peptide to prevent amyloid fibril formation.

25. The method of claim 24, wherein said BChE derived peptide is selected from the group consisting of SEQ ID NOs:8-20302.

26. The method of claim 24, wherein said β-sheet—responsive dye is a benzothiazole dye.

27. The method of claim 24, wherein said β-sheet—responsive dye is Thioflavin T.

28. The method of claim 27, wherein said Thioflavin T is provided at a concentration range of 0.5-1.5 μM.

29. The method of claim 27, wherein said Thioflavin T is provided at a concentration of about 1 μM.

30. The method of claim 24, wherein said amyloid precursor protein is selected from the group consisting of Transthyretin, Amyloid beta protein, Amyloid beta (1-40), Procalcitonin, IAPP (Amylin), amyloid light chain (AL), non-immunoglobulin amyloid associated (AA), non-immunoglobulin amyloid associated serum precursor (SAA), α-synucleic protein, ataxin and huntingtin.

31. The method of claim 30, wherein said Amyloid beta (1-40) is provided at a concentration in the range of 20-50 μM.

32. The method of claim 30, wherein said Amyloid beta (1-40) is provided at a concentration of about 33 μM.

33. A method of preventing and/or reversing amyloid fibril formation in a tissue of an individual comprising increasing a level of BChE or a BChE derived peptide being capable of preventing and/or reversing amyloid fibril formation in the tissue, thereby preventing and/or reversing amyloid fibril formation therein.

34. The method of claim 33, wherein the tissue is of an individual having, or being predisposed to an amyloid fibril-associated disease or disorder.

35. The method of claim 34, wherein said individual has a neurodegenerative disease, a disorder associated with systemic amyloidosis, a disorder associated with localized amyloidosis, a prion disease and/or a polyglutamine disorder.

36. The method of claim 35, wherein said neurodegenerative disease is selected from the group consisting of Alzheimer's disease, Huntington's disease and Parkinson's disease.

37. The method of claim 35, wherein said disorder associated with systemic amyloidosis is selected from the group consisting of Multiple myeloma, Chronic inflammatory disease, Rheumatoid arthritis, Tuberculosis, Skin abscess, lung abscess, Cancer, Hodgkin's disease, Hemodialysis for chronic renal failure, Heredofamilial amyloidosis, Familial Mediterranean Fever and Familial amyloid polyneuropathy.

38. The method of claim 35, wherein said disorder associated with localized amyloidosis is selected from the group consisting of Senile cardiac amyloidosis, Senile cerebral amyloidosis, Endocrine tumors, Medullary carcinoma of thyroid, Type II diabetes and Pancreatic islets β-cells.

39. The method of claim 35, wherein said prion disease is selected from the group consisting of Creutzfeldt-Jakob disease (CJD), spongioform enchephalopathies (TSE's), mad cow disease, Gerstmann-Straussler-Scheinker disease (GSS) and Kuru.

40. The method of claim 35, wherein said polyglutamine disorder is selected from the group consisting of Huntington's disease (HD), Spinal and Bulbar Muscular Atrophy (SBMA), DentatoRubral and PallidoLuysian Atrophy (DRPLA), spinocerebellar ataxia type 1 (SCA1), spinocerebellar ataxia type 2 (SCA2), Spinocerebellar ataxia type-3 (SCA3; Machado-Joseph Disease), Spinocerebellar ataxia type 7 (SCA7) and Spinocerebellar ataxia type 17 (SCA17).

41. The method of claim 33, wherein said amyloid is a protein selected from the group consisting of Transthyretin, Amyloid beta protein, Procalcitonin, IAPP (Amylin), amyloid light chain (AL), non-immunoglobulin amyloid associated (AA), non-immunoglobulin amyloid associated serum precursor (SAA), α-synucleic protein, ataxin and huntingtin.

42. The method of claim 33, wherein said increasing is effected by at least one approach selected from the group consisting of:
(a) expressing in cells of the individual an exogenous polynucleotide encoding said BChE or said BChE derived peptide;
(b) increasing expression of endogenous BChE in the individual;
(c) increasing endogenous BChE activity in the individual;
(d) administering BChE or the BChE derived peptide to the individual; and
(e) administering to the individual cells expressing the BChE or the BChE derived peptide.

43. The method of claim 42, wherein said exogenous polynucleotide encoding said BChE or said BChE derived peptide is derived from SEQ ID NO:7.

44. The method of claim 42, wherein said BChE is as set forth in SEQ ID NO:2.

45. The method of claim 42, wherein said BChE derived peptide is as set forth in any of SEQ ID NOs:1 and 8-20302.

46. A method of treating an individual having or being predisposed to a disease or disorder associated with amyloid fibril formation, the method comprising increasing a level of BChE or a BChE derived peptide in a tissue susceptible to the amyloid fibril formation of the individual, thereby treating the individual having or being predisposed to a disorder associated with amyloid fibril formation.

47. The method of claim 46, wherein said disease or disorder associated with amyloid fibril formation is a neurodegenerative disease, a disorder associated with systemic amyloidosis, a disorder associated with localized amyloidosis, a prion disease and/or a polyglutamine disorder.

48. The method of claim 47, wherein said neurodegenerative disease is selected from the group consisting of Alzheimer's disease, Huntington's disease and Parkinson's disease.

49. The method of claim 47, wherein said disorder associated with systemic amyloidosis is selected from the group consisting of Multiple myeloma, Chronic inflammatory disease, Rheumatoid arthritis, Tuberculosis, Skin abscess, lung abscess, Cancer, Hodgkin's disease, Hemodialysis for chronic renal failure, Heredofamilial amyloidosis, Familial Mediterranean Fever and Familial amyloid polyneuropathy.

50. The method of claim 47, wherein said disorder associated with localized amyloidosis is selected from the group consisting of Senile cardiac amyloidosis, Senile cerebral amyloidosis, Endocrine tumors, Medullary carcinoma of thyroid, Type II diabetes and Pancreatic islets β-cells.

51. The method of claim 47, wherein said prion disease is selected from the group consisting of Creutzfeldt-Jakob disease (CJD), spongioform enchephalopathies (TSE's), mad cow disease, Gerstmann-Straussler-Scheinker disease (GSS) and Kuru.

52. The method of claim 47, wherein said polyglutamine disorder is selected from the group consisting of Huntington's disease (HD), Spinal and Bulbar Muscular Atrophy (SBMA), DentatoRubral and PallidoLuysian Atrophy (DRPLA), spinocerebellar ataxia type 1 (SCA1), spinocerebellar ataxia type 2 (SCA2), Spinocerebellar ataxia type-3 (SCA3; Machado-Joseph Disease), Spinocerebellar ataxia type 7 (SCA7) and Spinocerebellar ataxia type 17 (SCA17).

53. The method of claim 46, wherein said amyloid is a protein selected from the group consisting of Transthyretin, Amyloid beta protein, Procalcitonin, IAPP (Amylin), amyloid light chain (AL), non-immunoglobulin amyloid associated (AA), non-immunoglobulin amyloid associated serum precursor (SAA), α-synucleic protein, ataxin and huntingtin.

54. The method of claim 46, wherein said increasing is effected by at least one approach selected from the group consisting of:
(a) expressing in cells of the individual an exogenous polynucleotide encoding said BChE or said BChE derived peptide;
(b) increasing expression of endogenous BChE in the individual;
(c) increasing endogenous BChE activity in the individual;
(d) administering BChE or the BChE derived peptide to the individual; and
(e) administering to the individual cells expressing the BChE or the BChE derived peptide.

55. The method of claim 54, wherein said exogenous polynucleotide encoding said BChE or said BChE derived peptide is derived from SEQ ID NO:7.

56. The method of claim 54, wherein said BChE is as set forth in SEQ ID NO:2.

57. The method of claim 54, wherein said BChE derived peptide is as set forth in any of SEQ ID NOs:1 and 8-20302.

58. A method of limiting or reducing an inflammatory reaction in an individual, comprising increasing an expression level and/or activity of BChE in the individual, thereby limiting or reducing the inflammatory reaction in the individual.

59. The method of claim 58, wherein the inflammatory reaction is modulated by circulating acetylcholine.

60. The method of claim 58, wherein said individual is subjected to a surgery, stress or a trauma.

61. The method of claim 58, wherein the inflammatory reaction is mediated by at least one pro-inflammatory cytokine selected from the group consisting of IL-1, IL-1α, IL-1β, IL-1ss, IL-6, IL-8, IL-10, IL-12, IL-18 and TNFα.

62. The method of claim 58, wherein said increasing is effected by at least one approach selected from the group consisting of:
(a) expressing in cells of the individual an exogenous polynucleotide encoding at least a functional portion of BChE;
(b) increasing expression of endogenous BChE in the individual;
(c) increasing endogenous BChE activity in the individual;
(d) administering an exogenous polypeptide including at least a functional portion of BChE to the individual;
(e) administering cells expressing the BChE into said individual.

63. The method of claim 62, wherein said exogenous polynucleotide encoding at least a functional portion of BChE is set forth by SEQ ID NO:7.

64. The method of claim 62, wherein said BChE is set forth by SEQ ID NO:2.

65. The use of BChE or a BChE derived peptide in the manufacturing of a medicament for the treatment of a disease or disorder associated with amyloid fibril formation or a predisposition thereto.

66. The use of claim 65, wherein said BChE derived peptide is selected from the group consisting of SEQ ID NO:1 and 8-20302.

67. The use of claim 65, wherein said disease or disorder associated with amyloid fibril formation is selected from the group consisting of a neurodegenerative disease, a disorder associated with systemic amyloidosis, a disorder associated with localized amyloidosis, a prion disease and/or a polyglutamine disorder.

68. The use of claim 67, wherein said neurodegenerative disease is selected from the group consisting of Alzheimer's disease, Huntington's disease and Parkinson's disease.

69. The use of claim 67, wherein said disorder associated with systemic amyloidosis is selected from the group consisting of Multiple myeloma, Chronic inflammatory disease, Rheumatoid arthritis, Tuberculosis, Skin abscess, lung abscess, Cancer, Hodgkin's disease, Hemodialysis for chronic renal failure, Heredofamilial amyloidosis, Familial Mediterranean Fever and Familial amyloid polyneuropathy.

70. The use of claim 67, wherein said disorder associated with localized amyloidosis is selected from the group consisting of Senile cardiac amyloidosis, Senile cerebral amyloidosis, Endocrine tumors, Medullary carcinoma of thyroid, Type II diabetes and Pancreatic islets β-cells.

71. The use of claim 67, wherein said prion disease is selected from the group consisting of Creutzfeldt-Jakob disease (CJD), spongioform enchephalopathies (TSE's), mad cow disease, Gerstmann-Straussler-Scheinker disease (GSS) and Kuru.

72. The use of claim 67, wherein said polyglutamine disorder is selected from the group consisting of Huntington's disease (HD), Spinal and Bulbar Muscular Atrophy (SBMA), DentatoRubral and PallidoLuysian Atrophy (DRPLA), spinocerebellar ataxia type 1 (SCA1), spinocerebellar ataxia type 2 (SCA2), Spinocerebellar ataxia type-3 (SCA3; Machado-Joseph Disease), Spinocerebellar ataxia type 7 (SCA7) and Spinocerebellar ataxia type 17 (SCA17).

73. The use of claim 65, wherein said amyloid is a protein selected from the group consisting of Transthyretin, Amyloid beta protein, Procalcitonin, IAPP (Amylin), amyloid light chain (AL), non-immunoglobulin amyloid associated (AA), non-immunoglobulin amyloid associated serum precursor (SAA), α-synucleic protein, ataxin and huntingtin.

74. The use of claim 65, wherein said BChE derived peptide is set forth by SEQ ID NO:1.

75. The use of claim 65, wherein said medicament is providable at a dose range of 0.1-1000 micromol per kg body weight.

76. The use of claim 65, wherein said medicament is providable at a dose range of 1-100 micromol per kg body weight.

77. The use of claim 65, wherein said medicament is providable at a dose range of 5-50 micromol per kg body weight.

The application's sequence listing, which the Patent Office published only in electronic form, follows.

SEQUENCE LISTING (20318 sequences)

SEQ ID NO: 1 - protein, 41 aa, Artificial sequence
  BSP41  Synthetic peptide
GNIDEAEWEWKAGFHRWNNYMMDWKNQFNDYTSKKESCVGL

SEQ ID NO: 2 - protein, 602 aa, Homo sapiens
MHSKVTIICIRFLFWFLLLCMLIGKSHTEDDIIIATKNGKVRGMNLTVFGGTVTAFLGIPYAQPPLGRLRFKKPQSLTKWSDIWNATKYANSCCQNIDQSFPGFHGSEMWNPNTDLSEDCLYLNVWIPAPKPKNATVLIWIYGGGFQTGTSSLHVYDGKFLARVERVIVVSMNYRVGALGFLALPGNPEAPGNMGLFDQQLALQWVQKNIAAFGGNPKSVTLFGESAGAASVSLHLLSPGSHSLFTRAILQSGSFNAPWAVTSLYEARNRTLNLAKLTGCSRENETEIIKCLRNKDPQEILLNEAFVVPYGTPLSVNFGPTVDGDFLTDMPDILLELGQFKKTQILVGVNKDEGTAFLVYGAPGFSKDNNSIITRKEFQEGLKIFFPGVSEFGKESILFHYTDWVDDQRPENYREALGDVVGDYNFICPALEFTKKFSEWGNNAFFYYFEHRSSKLPWPEWMGVMHGYEIEFVFGLPLERRDNYTKAEEILSRSIVKRWANFAKYGNPNETQNNSTSWPVFKSTEQKYLTLNTESTRIMTKLRAQQCRFWTSFFPKVLEMTGNIDEAEWEWKAGFHRWNNYMMDWKNQFNDYTSKKESCVGL

SEQ ID NO: 3 - protein, 53 aa, Artificial sequence
  ASP23 Synthetic peptide
FWNRFLPKLLSATDTLDEAERQWKAEFHRWSSYMVHWKNQFDHYSKQDRCSDL

SEQ ID NO: 4 - protein, 40 aa, Artificial sequence
  ASP40 Synthetic peptide
DTLDEAERQWKAEFHRWSSYMVHWKNQFDHYSKQDRCSDL

SEQ ID NO: 5 - protein, 63 aa, Artificial sequence
  ASP63 Synthetic peptide
PLEVRRGLRAQACAFWNRFLPKLLSATDTLDEAERQWKAEFHRWSSYMVHWKNQFDHYSKQDR

SEQ ID NO: 6 - protein, 614 aa, Homo sapiens
MRPPQCLLHTPSLASPLLLLLLWLLGGGVGAEGREDAELLVTVRGGRLRGIRLKTPGGPVSAFLGIPFAEPPMGPRRFLPPEPKQPWSGVVDATTFQSVCYQYVDTLYPGFEGTEMWNPNRELSEDCLYLNVWTPYPRPTSPTPVLVWIYGGGFYSGASSLDVYDGRFLVQAERTVLVSMNYRVGAFGFLALPGSREAPGNVGLLDQRLALQWVQENVAAFGGDPTSVTLFGESAGAASVGMHLLSPPSRGLFHRAVLQSGAPNGPWATVGMGEARRRATQLAHLVGCPPGGTGGNDTELVACLRTRPAQVLVNHEWHVLPQESVFRFSFVPVVDGDFLSDTPEALINAGDFHGLQVLVGVVKDEGSYFLVYGAPGFSKDNESLISRAEFLAGVRVGVPQVSDLAAEAVVLHYTDWLHPEDPARLREALSDVVGDHNVVCPVAQLAGRLAAQGARVYAYVFEHRASTLSWPLWMGVPHGYEIEFIFGIPLDPSRNYTAEEKIFAQRLMRYWANFARTGDPNEPRDPKAPQWPPYTAGAQQYVSLDLRPLEVRRGLRAQACAFWNRFLPKLLSATDTLDEAERQWKAEFHRWSSYMVHWKNQFDHYSKQDRCSDL

SEQ ID NO: 7 - DNA, 2444 bp, Homo sapiens
agtaacagttgattgttacattcagtaacactgaatgtcagtgcagtccaatttacaggctggagcagcagctgcatcctgcatttccccgaagtattacatgattttcactccttgcaaactttaccatctttgttgcagagaatcggaaatcaatatgcatagcaaagtcacaatcatatgcatcagatttctcttttggtttcttttgctctgcatgcttattgggaagtcacatactgaagatgacatcataattgcaacaaagaatggaaaagtcagagggatgaacttgacagtttttggtggcacggtaacagcctttcttggaattccctatgcacagccacctcttggtagacttcgattcaaaaagccacagtctctgaccaagtggtctgatatttggaatgccacaaaatatgcaaattcttgctgtcagaacatagatcaaagttttccaggcttccatggatcagagatgtggaacccaaacactgacctcagtgaagactgtttatatctaaatgtatggattccagcacctaaaccaaaaaatgccactgtattgatatggatttatggtggtggttttcaaactggaacatcatctttacatgtttatgatggcaagtttctggctcgggttgaaagagttattgtagtgtcaatgaactatagggtgggtgccctaggattcttagctttgccaggaaatcctgaggctccagggaacatgggtttatttgatcaacagttggctcttcagtgggttcaaaaaaatatagcagcctttggtggaaatcctaaaagtgtaactctctttggagaaagtgcaggagcagcttcagttagcctgcatttgctttctcctggaagccattcattgttcaccagagccattctgcaaagtggatcctttaatgctccttgggcggtaacatctctttatgaagctaggaacagaacgttgaacttagctaaattgactggttgctctagagagaatgagactgaaataatcaagtgtcttagaaataaagatccccaagaaattcttctgaatgaagcatttgttgtcccctatgggactcctttgtcagtaaactttggtccgaccgtggatggtgattttctcactgacatgccagacatattacttgaacttggacaatttaaaaaaacccagattttggtgggtgttaataaagatgaagggacagcttttttagtctatggtgctcctggcttcagcaaagataacaatagtatcataactagaaaagaatttcaggaaggtttaaaaatattttttccaggagtgagtgagtttggaaaggaatccatcctttttcattacacagactgggtagatgatcagagacctgaaaactaccgtgaggccttgggtgatgttgttggggattataatttcatatgccctgccttggagttcaccaagaagttctcagaatggggaaataatgcctttttctactattttgaacaccgatcctccaaacttccgtggccagaatggatgggagtgatgcatggctatgaaattgaatttgtctttggtttacctctggaaagaagagataattacacaaaagccgaggaaattttgagtagatccatagtgaaacggtgggcaaattttgcaaaatatgggaatccaaatgagactcagaacaatagcacaagctggcctgtcttcaaaagcactgaacaaaaatatctaaccttgaatacagagtcaacaagaataatgacgaaactacgtgctcaacaatgtcgattctggacatcattttttccaaaagtcttggaaatgacaggaaatattgatgaagcagaatgggagtggaaagcaggattccatcgctggaacaattacatgatggactggaaaaatcaatttaacgattacactagcaagaaagaaagttgtgtgggtctctaattaatagatttaccctttatagaacatattttcctttagatcaaggcaaaaatatcaggagcttttttacacacctactaaaaaagttattatgtagctgaaacaaaaatgccagaaggataatattgattcctcacatctttaacttagtattttacctagcatttcaaaacccaaatggctagaacatgtttaattaaatttcacaatataaagttctacagttaattatgtgcatattaaaacaatggcctggttcaatttctttctttccttaataaatttaagttttttccccccaaaattatcagtgctctgcttttagtcacgtgtattttcattaccactcgtaaaaaggtatcttttttaaatgaattaaatattgaaacactgtacaccatagtttacaatattatgtttcctaattaaaataagaattgaatgtcaatatgagatattaaaataagcacagaaaatc

SEQ ID NO: 8 - protein, 6 aa, Artificial sequence
  synthetic peptide
MHSKVT

SEQ ID NO: 9 - protein, 6 aa, Artificial sequence
  synthetic peptide
HSKVTI

SEQ ID NO: 10 - protein, 6 aa, Artificial sequence
  synthetic peptide
SKVTII

SEQ ID NO: 11 - protein, 6 aa, Artificial sequence
  synthetic peptide
KVTIIC

SEQ ID NO: 12 - protein, 6 aa, Artificial sequence
  synthetic peptide
VTIICI

SEQ ID NO: 13 - protein, 6 aa, Artificial sequence
  synthetic peptide
TIICIR

SEQ ID NO: 14 - protein, 6 aa, Artificial sequence
  synthetic peptide
IICIRF

SEQ ID NO: 15 - protein, 6 aa, Artificial sequence
  synthetic peptide
ICIRFL

SEQ ID NO: 16 - protein, 6 aa, Artificial sequence
  synthetic peptide
CIRFLF

SEQ ID NO: 17 - protein, 6 aa, Artificial sequence
  synthetic peptide
IRFLFW

SEQ ID NO: 18 - protein, 6 aa, Artificial sequence
  synthetic peptide
RFLFWF

SEQ ID NO: 19 - protein, 6 aa, Artificial sequence
  synthetic peptide
FLFWFL

SEQ ID NO: 20 - protein, 6 aa, Artificial sequence
  synthetic peptide
LFWFLL

SEQ ID NO: 21 - protein, 6 aa, Artificial sequence
  synthetic peptide
FWFLLL

SEQ ID NO: 22 - protein, 6 aa, Artificial sequence
  synthetic peptide
WFLLLC

SEQ ID NO: 23 - protein, 6 aa, Artificial sequence
  synthetic peptide
FLLLCM

SEQ ID NO: 24 - protein, 6 aa, Artificial sequence
  synthetic peptide
LLLCML

SEQ ID NO: 25 - protein, 6 aa, Artificial sequence
  synthetic peptide
LLCMLI

SEQ ID NO: 26 - protein, 6 aa, Artificial sequence
  synthetic peptide
LCMLIG

SEQ ID NO: 27 - protein, 6 aa, Artificial sequence
  synthetic peptide
CMLIGK

SEQ ID NO: 28 - protein, 6 aa, Artificial sequence
  synthetic peptide
MLIGKS

SEQ ID NO: 29 - protein, 6 aa, Artificial sequence
  synthetic peptide
LIGKSH

SEQ ID NO: 30 - protein, 6 aa, Artificial sequence
  synthetic peptide
IGKSHT

SEQ ID NO: 31 - protein, 6 aa, Artificial sequence
  synthetic peptide
GKSHTE

SEQ ID NO: 32 - protein, 6 aa, Artificial sequence
  synthetic peptide
KSHTED

SEQ ID NO: 33 - protein, 6 aa, Artificial sequence
  synthetic peptide
SHTEDD

SEQ ID NO: 34 - protein, 6 aa, Artificial sequence
  synthetic peptide
HTEDDI

SEQ ID NO: 35 - protein, 6 aa, Artificial sequence
  synthetic peptide
TEDDII

SEQ ID NO: 36 - protein, 6 aa, Artificial sequence
  synthetic peptide
EDDIII

SEQ ID NO: 37 - protein, 6 aa, Artificial sequence
  synthetic peptide
DDIIIA

SEQ ID NO: 38 - protein, 6 aa, Artificial sequence
  synthetic peptide
DIIIAT

SEQ ID NO: 39 - protein, 6 aa, Artificial sequence
  synthetic peptide
IIIATK

SEQ ID NO: 40 - protein, 6 aa, Artificial sequence
  synthetic peptide
IIATKN

SEQ ID NO: 41 - protein, 6 aa, Artificial sequence
  synthetic peptide
IATKNG

SEQ ID NO: 42 - protein, 6 aa, Artificial sequence
  synthetic peptide
ATKNGK

SEQ ID NO: 43 - protein, 6 aa, Artificial sequence
  synthetic peptide
TKNGKV

SEQ ID NO: 44 - protein, 6 aa, Artificial sequence
  synthetic peptide
KNGKVR

SEQ ID NO: 45 - protein, 6 aa, Artificial sequence
  synthetic peptide
NGKVRG

SEQ ID NO: 46 - protein, 6 aa, Artificial sequence
  synthetic peptide
GKVRGM

SEQ ID NO: 47 - protein, 6 aa, Artificial sequence
  synthetic peptide
KVRGMN

SEQ ID NO: 48 - protein, 6 aa, Artificial sequence
  synthetic peptide
VRGMNL

SEQ ID NO: 49 - protein, 6 aa, Artificial sequence
  synthetic peptide
RGMNLT

SEQ ID NO: 50 - protein, 6 aa, Artificial sequence
  synthetic peptide
GMNLTV

SEQ ID NO: 51 - protein, 6 aa, Artificial sequence
  synthetic peptide
MNLTVF

SEQ ID NO: 52 - protein, 6 aa, Artificial sequence
  synthetic peptide
NLTVFG

SEQ ID NO: 53 - protein, 6 aa, Artificial sequence
  synthetic peptide
LTVFGG

SEQ ID NO: 54 - protein, 6 aa, Artificial sequence
  synthetic peptide
TVFGGT

SEQ ID NO: 55 - protein, 6 aa, Artificial sequence
  synthetic peptide
VFGGTV

SEQ ID NO: 56 - protein, 6 aa, Artificial sequence
  synthetic peptide
FGGTVT

SEQ ID NO: 57 - protein, 6 aa, Artificial sequence
  synthetic peptide
GGTVTA

SEQ ID NO: 58 - protein, 6 aa, Artificial sequence
  synthetic peptide
GTVTAF

SEQ ID NO: 59 - protein, 6 aa, Artificial sequence
  synthetic peptide
TVTAFL

SEQ ID NO: 60 - protein, 6 aa, Artificial sequence
  synthetic peptide
VTAFLG

SEQ ID NO: 61 - protein, 6 aa, Artificial sequence
  synthetic peptide
TAFLGI

SEQ ID NO: 62 - protein, 6 aa, Artificial sequence
  synthetic peptide
AFLGIP

SEQ ID NO: 63 - protein, 6 aa, Artificial sequence
  synthetic peptide
FLGIPY

SEQ ID NO: 64 - protein, 6 aa, Artificial sequence
  synthetic peptide
LGIPYA

SEQ ID NO: 65 - protein, 6 aa, Artificial sequence
  synthetic peptide
GIPYAQ

SEQ ID NO: 66 - protein, 6 aa, Artificial sequence
  synthetic peptide
IPYAQP

SEQ ID NO: 67 - protein, 6 aa, Artificial sequence
  synthetic peptide
PYAQPP

SEQ ID NO: 68 - protein, 6 aa, Artificial sequence
  synthetic peptide
YAQPPL

SEQ ID NO: 69 - protein, 6 aa, Artificial sequence
  synthetic peptide
AQPPLG

SEQ ID NO: 70 - protein, 6 aa, Artificial sequence
  synthetic peptide
QPPLGR

SEQ ID NO: 71 - protein, 6 aa, Artificial sequence
  synthetic peptide
PPLGRL

SEQ ID NO: 72 - protein, 6 aa, Artificial sequence
  synthetic peptide
PLGRLR

SEQ ID NO: 73 - protein, 6 aa, Artificial sequence
  synthetic peptide
LGRLRF

SEQ ID NO: 74 - protein, 6 aa, Artificial sequence
  synthetic peptide
GRLRFK

SEQ ID NO: 75 - protein, 6 aa, Artificial sequence
  synthetic peptide
RLRFKK

SEQ ID NO: 76 - protein, 6 aa, Artificial sequence
  synthetic peptide
LRFKKP

SEQ ID NO: 77 - protein, 6 aa, Artificial sequence
  synthetic peptide
RFKKPQ

SEQ ID NO: 78 - protein, 6 aa, Artificial sequence
  synthetic peptide
FKKPQS

SEQ ID NO: 79 - protein, 6 aa, Artificial sequence
  synthetic peptide
KKPQSL

SEQ ID NO: 80 - protein, 6 aa, Artificial sequence
  synthetic peptide
KPQSLT

SEQ ID NO: 81 - protein, 6 aa, Artificial sequence
  synthetic peptide
PQSLTK

SEQ ID NO: 82 - protein, 6 aa, Artificial sequence
  synthetic peptide
QSLTKW

SEQ ID NO: 83 - protein, 6 aa, Artificial sequence
  synthetic peptide
SLTKWS

SEQ ID NO: 84 - protein, 6 aa, Artificial sequence
  synthetic peptide
LTKWSD

SEQ ID NO: 85 - protein, 6 aa, Artificial sequence
  synthetic peptide
TKWSDI

SEQ ID NO: 86 - protein, 6 aa, Artificial sequence
  synthetic peptide
KWSDIW

SEQ ID NO: 87 - protein, 6 aa, Artificial sequence
  synthetic peptide
WSDIWN

SEQ ID NO: 88 - protein, 6 aa, Artificial sequence
  synthetic peptide
SDIWNA

SEQ ID NO: 89 - protein, 6 aa, Artificial sequence
  synthetic peptide
DIWNAT

SEQ ID NO: 90 - protein, 6 aa, Artificial sequence
  synthetic peptide
IWNATK

SEQ ID NO: 91 - protein, 6 aa, Artificial sequence
  synthetic peptide
WNATKY

SEQ ID NO: 92 - protein, 6 aa, Artificial sequence
  synthetic peptide
NATKYA

SEQ ID NO: 93 - protein, 6 aa, Artificial sequence
  synthetic peptide
ATKYAN

SEQ ID NO: 94 - protein, 6 aa, Artificial sequence
  synthetic peptide
TKYANS

SEQ ID NO: 95 - protein, 6 aa, Artificial sequence
  synthetic peptide
KYANSC

SEQ ID NO: 96 - protein, 6 aa, Artificial sequence
  synthetic peptide
YANSCC

SEQ ID NO: 97 - protein, 6 aa, Artificial sequence
  synthetic peptide
ANSCCQ

SEQ ID NO: 98 - protein, 6 aa, Artificial sequence
  synthetic peptide
NSCCQN

SEQ ID NO: 99 - protein, 6 aa, Artificial sequence
  synthetic peptide
SCCQNI

SEQ ID NO: 100 - protein, 6 aa, Artificial sequence
  synthetic peptide
CCQNID

SEQ ID NO: 101 - protein, 6 aa, Artificial sequence
  synthetic peptide
CQNIDQ

SEQ ID NO: 102 - protein, 6 aa, Artificial sequence
  synthetic peptide
QNIDQS

SEQ ID NO: 103 - protein, 6 aa, Artificial sequence
  synthetic peptide
NIDQSF

SEQ ID NO: 104 - protein, 6 aa, Artificial sequence
  synthetic peptide
IDQSFP

SEQ ID NO: 105 - protein, 6 aa, Artificial sequence
  synthetic peptide
DQSFPG

SEQ ID NO: 106 - protein, 6 aa, Artificial sequence
  synthetic peptide
QSFPGF

SEQ ID NO: 107 - protein, 6 aa, Artificial sequence
  synthetic peptide
SFPGFH

SEQ ID NO: 108 - protein, 6 aa, Artificial sequence
  synthetic peptide
FPGFHG

SEQ ID NO: 109 - protein, 6 aa, Artificial sequence
  synthetic peptide
PGFHGS

SEQ ID NO: 110 - protein, 6 aa, Artificial sequence
  synthetic peptide
GFHGSE

SEQ ID NO: 111 - protein, 6 aa, Artificial sequence
  synthetic peptide
FHGSEM

SEQ ID NO: 112 - protein, 6 aa, Artificial sequence
  synthetic peptide
HGSEMW

SEQ ID NO: 113 - protein, 6 aa, Artificial sequence
  synthetic peptide
GSEMWN

SEQ ID NO: 114 - protein, 6 aa, Artificial sequence
  synthetic peptide
SEMWNP

SEQ ID NO: 115 - protein, 6 aa, Artificial sequence
  synthetic peptide
EMWNPN

SEQ ID NO: 116 - protein, 6 aa, Artificial sequence
  synthetic peptide
MWNPNT

SEQ ID NO: 117 - protein, 6 aa, Artificial sequence
  synthetic peptide
WNPNTD

SEQ ID NO: 118 - protein, 6 aa, Artificial sequence
  synthetic peptide
NPNTDL

SEQ ID NO: 119 - protein, 6 aa, Artificial sequence
  synthetic peptide
PNTDLS

SEQ ID NO: 120 - protein, 6 aa, Artificial sequence
  synthetic peptide
NTDLSE

SEQ ID NO: 121 - protein, 6 aa, Artificial sequence
  synthetic peptide
TDLSED

SEQ ID NO: 122 - protein, 6 aa, Artificial sequence
  synthetic peptide
DLSEDC

SEQ ID NO: 123 - protein, 6 aa, Artificial sequence
  synthetic peptide
LSEDCL

SEQ ID NO: 124 - protein, 6 aa, Artificial sequence
  synthetic peptide
SEDCLY

SEQ ID NO: 125 - protein, 6 aa, Artificial sequence
  synthetic peptide
EDCLYL

SEQ ID NO: 126 - protein, 6 aa, Artificial sequence
  synthetic peptide
DCLYLN

SEQ ID NO: 127 - protein, 6 aa, Artificial sequence
  synthetic peptide
CLYLNV

SEQ ID NO: 128 - protein, 6 aa, Artificial sequence
  synthetic peptide
LYLNVW

SEQ ID NO: 129 - protein, 6 aa, Artificial sequence
  synthetic peptide
YLNVWI

SEQ ID NO: 130 - protein, 6 aa, Artificial sequence
  synthetic peptide
LNVWIP

SEQ ID NO: 131 - protein, 6 aa, Artificial sequence
  synthetic peptide
NVWIPA

SEQ ID NO: 132 - protein, 6 aa, Artificial sequence
  synthetic peptide
VWIPAP

SEQ ID NO: 133 - protein, 6 aa, Artificial sequence
  synthetic peptide
WIPAPK

SEQ ID NO: 134 - protein, 6 aa, Artificial sequence
  synthetic peptide
IPAPKP

SEQ ID NO: 135 - protein, 6 aa, Artificial sequence
  synthetic peptide
PAPKPK

SEQ ID NO: 136 - protein, 6 aa, Artificial sequence
  synthetic peptide
APKPKN

SEQ ID NO: 137 - protein, 6 aa, Artificial sequence
  synthetic peptide
PKPKNA

SEQ ID NO: 138 - protein, 6 aa, Artificial sequence
  synthetic peptide
KPKNAT

SEQ ID NO: 139 - protein, 6 aa, Artificial sequence
  synthetic peptide
PKNATV

SEQ ID NO: 140 - protein, 6 aa, Artificial sequence
  synthetic peptide
KNATVL

SEQ ID NO: 141 - protein, 6 aa, Artificial sequence
  synthetic peptide
NATVLI

SEQ ID NO: 142 - protein, 6 aa, Artificial sequence
  synthetic peptide
ATVLIW

SEQ ID NO: 143 - protein, 6 aa, Artificial sequence
  synthetic peptide
TVLIWI

SEQ ID NO: 144 - protein, 6 aa, Artificial sequence
  synthetic peptide
VLIWIY

SEQ ID NO: 145 - protein, 6 aa, Artificial sequence
  synthetic peptide
LIWIYG

SEQ ID NO: 146 - protein, 6 aa, Artificial sequence
  synthetic peptide
IWIYGG

SEQ ID NO: 147 - protein, 6 aa, Artificial sequence
  synthetic peptide
WIYGGG

SEQ ID NO: 148 - protein, 6 aa, Artificial sequence
  synthetic peptide
IYGGGF

SEQ ID NO: 149 - protein, 6 aa, Artificial sequence
  synthetic peptide
YGGGFQ

SEQ ID NO: 150 - protein, 6 aa, Artificial sequence
  synthetic peptide
GGGFQT

SEQ ID NO: 151 - protein, 6 aa, Artificial sequence
  synthetic peptide
GGFQTG

SEQ ID NO: 152 - protein, 6 aa, Artificial sequence
  synthetic peptide
GFQTGT

SEQ ID NO: 153 - protein, 6 aa, Artificial sequence
  synthetic peptide
FQTGTS

SEQ ID NO: 154 - protein, 6 aa, Artificial sequence
  synthetic peptide
QTGTSS

SEQ ID NO: 155 - protein, 6 aa, Artificial sequence
  synthetic peptide
TGTSSL

SEQ ID NO: 156 - protein, 6 aa, Artificial sequence
  synthetic peptide
GTSSLH

SEQ ID NO: 157 - protein, 6 aa, Artificial sequence
  synthetic peptide
TSSLHV

SEQ ID NO: 158 - protein, 6 aa, Artificial sequence
  synthetic peptide
SSLHVY

SEQ ID NO: 159 - protein, 6 aa, Artificial sequence
  synthetic peptide
SLHVYD

SEQ ID NO: 160 - protein, 6 aa, Artificial sequence
  synthetic peptide
LHVYDG

SEQ ID NO: 161 - protein, 6 aa, Artificial sequence
  synthetic peptide
HVYDGK

SEQ ID NO: 162 - protein, 6 aa, Artificial sequence
  synthetic peptide
VYDGKF

SEQ ID NO: 163 - protein, 6 aa, Artificial sequence
  synthetic peptide
YDGKFL

SEQ ID NO: 164 - protein, 6 aa, Artificial sequence
  synthetic peptide
DGKFLA

SEQ ID NO: 165 - protein, 6 aa, Artificial sequence
  synthetic peptide
GKFLAR

SEQ ID NO: 166 - protein, 6 aa, Artificial sequence
  synthetic peptide
KFLARV

SEQ ID NO: 167 - protein, 6 aa, Artificial sequence
  synthetic peptide
FLARVE

SEQ ID NO: 168 - protein, 6 aa, Artificial sequence
  synthetic peptide
LARVER

SEQ ID NO: 169 - protein, 6 aa, Artificial sequence
  synthetic peptide
ARVERV

SEQ ID NO: 170 - protein, 6 aa, Artificial sequence
  synthetic peptide
RVERVI

SEQ ID NO: 171 - protein, 6 aa, Artificial sequence
  synthetic peptide
VERVIV

SEQ ID NO: 172 - protein, 6 aa, Artificial sequence
  synthetic peptide
ERVIVV

SEQ ID NO: 173 - protein, 6 aa, Artificial sequence
  synthetic peptide
RVIVVS

SEQ ID NO: 174 - protein, 6 aa, Artificial sequence
  synthetic peptide
VIVVSM

SEQ ID NO: 175 - protein, 6 aa, Artificial sequence
  synthetic peptide
IVVSMN

SEQ ID NO: 176 - protein, 6 aa, Artificial sequence
  synthetic peptide
VVSMNY

SEQ ID NO: 177 - protein, 6 aa, Artificial sequence
  synthetic peptide
VSMNYR

SEQ ID NO: 178 - protein, 6 aa, Artificial sequence
  synthetic peptide
SMNYRV

SEQ ID NO: 179 - protein, 6 aa, Artificial sequence
  synthetic peptide
MNYRVG

SEQ ID NO: 180 - protein, 6 aa, Artificial sequence
  synthetic peptide
NYRVGA

SEQ ID NO: 181 - protein, 6 aa, Artificial sequence
  synthetic peptide
YRVGAL

SEQ ID NO: 182 - protein, 6 aa, Artificial sequence
  synthetic peptide
RVGALG

SEQ ID NO: 183 - protein, 6 aa, Artificial sequence
  synthetic peptide
VGALGF

SEQ ID NO: 184 - protein, 6 aa, Artificial sequence
  synthetic peptide
GALGFL

SEQ ID NO: 185 - protein, 6 aa, Artificial sequence
  synthetic peptide
ALGFLA

SEQ ID NO: 186 - protein, 6 aa, Artificial sequence
  synthetic peptide
LGFLAL

SEQ ID NO: 187 - protein, 6 aa, Artificial sequence
  synthetic peptide
GFLALP

SEQ ID NO: 188 - protein, 6 aa, Artificial sequence
  synthetic peptide
FLALPG

SEQ ID NO: 189 - protein, 6 aa, Artificial sequence
  synthetic peptide
LALPGN

SEQ ID NO: 190 - protein, 6 aa, Artificial sequence
  synthetic peptide
ALPGNP

SEQ ID NO: 191 - protein, 6 aa, Artificial sequence
  synthetic peptide
LPGNPE

SEQ ID NO: 192 - protein, 6 aa, Artificial sequence
  synthetic peptide
PGNPEA

SEQ ID NO: 193 - protein, 6 aa, Artificial sequence
  synthetic peptide
GNPEAP

SEQ ID NO: 194 - protein, 6 aa, Artificial sequence
  synthetic peptide
NPEAPG

SEQ ID NO: 195 - protein, 6 aa, Artificial sequence
  synthetic peptide
PEAPGN

SEQ ID NO: 196 - protein, 6 aa, Artificial sequence
  synthetic peptide
EAPGNM

SEQ ID NO: 197 - protein, 6 aa, Artificial sequence
  synthetic peptide
APGNMG

SEQ ID NO: 198 - protein, 6 aa, Artificial sequence
  synthetic peptide
PGNMGL

SEQ ID NO: 199 - protein, 6 aa, Artificial sequence
  synthetic peptide
GNMGLF

SEQ ID NO: 200 - protein, 6 aa, Artificial sequence
  synthetic peptide
NMGLFD

SEQ ID NO: 201 - protein, 6 aa, Artificial sequence
  synthetic peptide
MGLFDQ

SEQ ID NO: 202 - protein, 6 aa, Artificial sequence
  synthetic peptide
GLFDQQ

SEQ ID NO: 203 - protein, 6 aa, Artificial sequence
  synthetic peptide
LFDQQL

SEQ ID NO: 204 - protein, 6 aa, Artificial sequence
  synthetic peptide
FDQQLA

SEQ ID NO: 205 - protein, 6 aa, Artificial sequence
  synthetic peptide
DQQLAL

SEQ ID NO: 206 - protein, 6 aa, Artificial sequence
  synthetic peptide
QQLALQ

SEQ ID NO: 207 - protein, 6 aa, Artificial sequence
  synthetic peptide
QLALQW

SEQ ID NO: 208 - protein, 6 aa, Artificial sequence
  synthetic peptide
LALQWV

SEQ ID NO: 209 - protein, 6 aa, Artificial sequence
  synthetic peptide
ALQWVQ

SEQ ID NO: 210 - protein, 6 aa, Artificial sequence
  synthetic peptide
LQWVQK

SEQ ID NO: 211 - protein, 6 aa, Artificial sequence
  synthetic peptide
QWVQKN

SEQ ID NO: 212 - protein, 6 aa, Artificial sequence
  synthetic peptide
WVQKNI

SEQ ID NO: 213 - protein, 6 aa, Artificial sequence
  synthetic peptide
VQKNIA

SEQ ID NO: 214 - protein, 6 aa, Artificial sequence
  synthetic peptide
QKNIAA

SEQ ID NO: 215 - protein, 6 aa, Artificial sequence
  synthetic peptide
KNIAAF

SEQ ID NO: 216 - protein, 6 aa, Artificial sequence
  synthetic peptide
NIAAFG

SEQ ID NO: 217 - protein, 6 aa, Artificial sequence
  synthetic peptide
IAAFGG

SEQ ID NO: 218 - protein, 6 aa, Artificial sequence
  synthetic peptide
AAFGGN

SEQ ID NO: 219 - protein, 6 aa, Artificial sequence
  synthetic peptide
AFGGNP

SEQ ID NO: 220 - protein, 6 aa, Artificial sequence
  synthetic peptide
FGGNPK

SEQ ID NO: 221 - protein, 6 aa, Artificial sequence
  synthetic peptide
GGNPKS

SEQ ID NO: 222 - protein, 6 aa, Artificial sequence
  synthetic peptide
GNPKSV

SEQ ID NO: 223 - protein, 6 aa, Artificial sequence
  synthetic peptide
NPKSVT

SEQ ID NO: 224 - protein, 6 aa, Artificial sequence
  synthetic peptide
PKSVTL

SEQ ID NO: 225 - protein, 6 aa, Artificial sequence
  synthetic peptide
KSVTLF

SEQ ID NO: 226 - protein, 6 aa, Artificial sequence
  synthetic peptide
SVTLFG

SEQ ID NO: 227 - protein, 6 aa, Artificial sequence
  synthetic peptide
VTLFGE

SEQ ID NO: 228 - protein, 6 aa, Artificial sequence
  synthetic peptide
TLFGES

SEQ ID NO: 229 - protein, 6 aa, Artificial sequence
  synthetic peptide
LFGESA

SEQ ID NO: 230 - protein, 6 aa, Artificial sequence
  synthetic peptide
FGESAG

SEQ ID NO: 231 - protein, 6 aa, Artificial sequence
  synthetic peptide
GESAGA

SEQ ID NO: 232 - protein, 6 aa, Artificial sequence
  synthetic peptide
ESAGAA

SEQ ID NO: 233 - protein, 6 aa, Artificial sequence
  synthetic peptide
SAGAAS

SEQ ID NO: 234 - protein, 6 aa, Artificial sequence
  synthetic peptide
AGAASV

SEQ ID NO: 235 - protein, 6 aa, Artificial sequence
  synthetic peptide
GAASVS

SEQ ID NO: 236 - protein, 6 aa, Artificial sequence
  synthetic peptide
AASVSL

SEQ ID NO: 237 - protein, 6 aa, Artificial sequence
  synthetic peptide
ASVSLH

SEQ ID NO: 238 - protein, 6 aa, Artificial sequence
  synthetic peptide
SVSLHL

SEQ ID NO: 239 - protein, 6 aa, Artificial sequence
  synthetic peptide
VSLHLL

SEQ ID NO: 240 - protein, 6 aa, Artificial sequence
  synthetic peptide
SLHLLS

SEQ ID NO: 241 - protein, 6 aa, Artificial sequence
  synthetic peptide
LHLLSP

SEQ ID NO: 242 - protein, 6 aa, Artificial sequence
  synthetic peptide
HLLSPG

SEQ ID NO: 243 - protein, 6 aa, Artificial sequence
  synthetic peptide
LLSPGS

SEQ ID NO: 244 - protein, 6 aa, Artificial sequence
  synthetic peptide
LSPGSH

SEQ ID NO: 245 - protein, 6 aa, Artificial sequence
  synthetic peptide
SPGSHS

SEQ ID NO: 246 - protein, 6 aa, Artificial sequence
  synthetic peptide
PGSHSL

SEQ ID NO: 247 - protein, 6 aa, Artificial sequence
  synthetic peptide
GSHSLF

SEQ ID NO: 248 - protein, 6 aa, Artificial sequence
  synthetic peptide
SHSLFT

SEQ ID NO: 249 - protein, 6 aa, Artificial sequence
  synthetic peptide
HSLFTR

SEQ ID NO: 250 - protein, 6 aa, Artificial sequence
  synthetic peptide
SLFTRA

SEQ ID NO: 251 - protein, 6 aa, Artificial sequence
  synthetic peptide
LFTRAI

SEQ ID NO: 252 - protein, 6 aa, Artificial sequence
  synthetic peptide
FTRAIL

SEQ ID NO: 253 - protein, 6 aa, Artificial sequence
  synthetic peptide
TRAILQ

SEQ ID NO: 254 - protein, 6 aa, Artificial sequence
  synthetic peptide
RAILQS

SEQ ID NO: 255 - protein, 6 aa, Artificial sequence
  synthetic peptide
AILQSG

SEQ ID NO: 256 - protein, 6 aa, Artificial sequence
  synthetic peptide
ILQSGS

SEQ ID NO: 257 - protein, 6 aa, Artificial sequence
  synthetic peptide
LQSGSF

SEQ ID NO: 258 - protein, 6 aa, Artificial sequence
  synthetic peptide
QSGSFN

SEQ ID NO: 259 - protein, 6 aa, Artificial sequence
  synthetic peptide
SGSFNA

SEQ ID NO: 260 - protein, 6 aa, Artificial sequence
  synthetic peptide
GSFNAP

SEQ ID NO: 261 - protein, 6 aa, Artificial sequence
  synthetic peptide
SFNAPW

SEQ ID NO: 262 - protein, 6 aa, Artificial sequence
  synthetic peptide
FNAPWA

SEQ ID NO: 263 - protein, 6 aa, Artificial sequence
  synthetic peptide
NAPWAV

SEQ ID NO: 264 - protein, 6 aa, Artificial sequence
  synthetic peptide
APWAVT

SEQ ID NO: 265 - protein, 6 aa, Artificial sequence
  synthetic peptide
PWAVTS

SEQ ID NO: 266 - protein, 6 aa, Artificial sequence
  synthetic peptide
WAVTSL

SEQ ID NO: 267 - protein, 6 aa, Artificial sequence
  synthetic peptide
AVTSLY

SEQ ID NO: 268 - protein, 6 aa, Artificial sequence
  synthetic peptide
VTSLYE

SEQ ID NO: 269 - protein, 6 aa, Artificial sequence
  synthetic peptide
TSLYEA

SEQ ID NO: 270 - protein, 6 aa, Artificial sequence
  synthetic peptide
SLYEAR

SEQ ID NO: 271 - protein, 6 aa, Artificial sequence
  synthetic peptide
LYEARN

SEQ ID NO: 272 - protein, 6 aa, Artificial sequence
  synthetic peptide
YEARNR

SEQ ID NO: 273 - protein, 6 aa, Artificial sequence
  synthetic peptide
EARNRT

SEQ ID NO: 274 - protein, 6 aa, Artificial sequence
  synthetic peptide
ARNRTL

SEQ ID NO: 275 - protein, 6 aa, Artificial sequence
  synthetic peptide
RNRTLN

SEQ ID NO: 276 - protein, 6 aa, Artificial sequence
  synthetic peptide
NRTLNL

SEQ ID NO: 277 - protein, 6 aa, Artificial sequence
  synthetic peptide
RTLNLA

SEQ ID NO: 278 - protein, 6 aa, Artificial sequence
  synthetic peptide
TLNLAK

SEQ ID NO: 279 - protein, 6 aa, Artificial sequence
  synthetic peptide
LNLAKL

SEQ ID NO: 280 - protein, 6 aa, Artificial sequence
  synthetic peptide
NLAKLT

SEQ ID NO: 281 - protein, 6 aa, Artificial sequence
  synthetic peptide
LAKLTG

SEQ ID NO: 282 - protein, 6 aa, Artificial sequence
  synthetic peptide
AKLTGC

SEQ ID NO: 283 - protein, 6 aa, Artificial sequence
  synthetic peptide
KLTGCS

SEQ ID NO: 284 - protein, 6 aa, Artificial sequence
  synthetic peptide
LTGCSR

SEQ ID NO: 285 - protein, 6 aa, Artificial sequence
  synthetic peptide
TGCSRE

SEQ ID NO: 286 - protein, 6 aa, Artificial sequence
  synthetic peptide
GCSREN

SEQ ID NO: 287 - protein, 6 aa, Artificial sequence
  synthetic peptide
CSRENE

SEQ ID NO: 288 - protein, 6 aa, Artificial sequence
  synthetic peptide
SRENET

SEQ ID NO: 289 - protein, 6 aa, Artificial sequence
  synthetic peptide
RENETE

SEQ ID NO: 290 - protein, 6 aa, Artificial sequence
  synthetic peptide
ENETEI

SEQ ID NO: 291 - protein, 6 aa, Artificial sequence
  synthetic peptide
NETEII

SEQ ID NO: 292 - protein, 6 aa, Artificial sequence
  synthetic peptide
ETEIIK

SEQ ID NO: 293 - protein, 6 aa, Artificial sequence
  synthetic peptide
TEIIKC

SEQ ID NO: 294 - protein, 6 aa, Artificial sequence
  synthetic peptide
EIIKCL

SEQ ID NO: 295 - protein, 6 aa, Artificial sequence
  synthetic peptide
IIKCLR

SEQ ID NO: 296 - protein, 6 aa, Artificial sequence
  synthetic peptide
IKCLRN

SEQ ID NO: 297 - protein, 6 aa, Artificial sequence
  synthetic peptide
KCLRNK

SEQ ID NO: 298 - protein, 6 aa, Artificial sequence
  synthetic peptide
CLRNKD

SEQ ID NO: 299 - protein, 6 aa, Artificial sequence
  synthetic peptide
LRNKDP

SEQ ID NO: 300 - protein, 6 aa, Artificial sequence
  synthetic peptide
RNKDPQ

SEQ ID NO: 301 - protein, 6 aa, Artificial sequence
  synthetic peptide
NKDPQE

SEQ ID NO: 302 - protein, 6 aa, Artificial sequence
  synthetic peptide
KDPQEI

SEQ ID NO: 303 - protein, 6 aa, Artificial sequence
  synthetic peptide
DPQEIL

SEQ ID NO: 304 - protein, 6 aa, Artificial sequence
  synthetic peptide
PQEILL

SEQ ID NO: 305 - protein, 6 aa, Artificial sequence
  synthetic peptide
QEILLN

SEQ ID NO: 306 - protein, 6 aa, Artificial sequence
  synthetic peptide
EILLNE

SEQ ID NO: 307 - protein, 6 aa, Artificial sequence
  synthetic peptide
ILLNEA

SEQ ID NO: 308 - protein, 6 aa, Artificial sequence
  synthetic peptide
LLNEAF

SEQ ID NO: 309 - protein, 6 aa, Artificial sequence
  synthetic peptide
LNEAFV

SEQ ID NO: 310 - protein, 6 aa, Artificial sequence
  synthetic peptide
NEAFVV

SEQ ID NO: 311 - protein, 6 aa, Artificial sequence
  synthetic peptide
EAFVVP

SEQ ID NO: 312 - protein, 6 aa, Artificial sequence
  synthetic peptide
AFVVPY

SEQ ID NO: 313 - protein, 6 aa, Artificial sequence
  synthetic peptide
FVVPYG

SEQ ID NO: 314 - protein, 6 aa, Artificial sequence
  synthetic peptide
VVPYGT

SEQ ID NO: 315 - protein, 6 aa, Artificial sequence
  synthetic peptide
VPYGTP

SEQ ID NO: 316 - protein, 6 aa, Artificial sequence
  synthetic peptide
PYGTPL

SEQ ID NO: 317 - protein, 6 aa, Artificial sequence
  synthetic peptide
YGTPLS

SEQ ID NO: 318 - protein, 6 aa, Artificial sequence
  synthetic peptide
GTPLSV

SEQ ID NO: 319 - protein, 6 aa, Artificial sequence
  synthetic peptide
TPLSVN

SEQ ID NO: 320 - protein, 6 aa, Artificial sequence
  synthetic peptide
PLSVNF

SEQ ID NO: 321 - protein, 6 aa, Artificial sequence
  synthetic peptide
LSVNFG

SEQ ID NO: 322 - protein, 6 aa, Artificial sequence
  synthetic peptide
SVNFGP

SEQ ID NO: 323 - protein, 6 aa, Artificial sequence
  synthetic peptide
VNFGPT

SEQ ID NO: 324 - protein, 6 aa, Artificial sequence
  synthetic peptide
NFGPTV

SEQ ID NO: 325 - protein, 6 aa, Artificial sequence
  synthetic peptide
FGPTVD

SEQ ID NO: 326 - protein, 6 aa, Artificial sequence
  synthetic peptide
GPTVDG

SEQ ID NO: 327 - protein, 6 aa, Artificial sequence
  synthetic peptide
PTVDGD

SEQ ID NO: 328 - protein, 6 aa, Artificial sequence
  synthetic peptide
TVDGDF

SEQ ID NO: 329 - protein, 6 aa, Artificial sequence
  synthetic peptide
VDGDFL

SEQ ID NO: 330 - protein, 6 aa, Artificial sequence
  synthetic peptide
DGDFLT

SEQ ID NO: 331 - protein, 6 aa, Artificial sequence
  synthetic peptide
GDFLTD

SEQ ID NO: 332 - protein, 6 aa, Artificial sequence
  synthetic peptide
DFLTDM

SEQ ID NO: 333 - protein, 6 aa, Artificial sequence
  synthetic peptide
FLTDMP

SEQ ID NO: 334 - protein, 6 aa, Artificial sequence
  synthetic peptide
LTDMPD

SEQ ID NO: 335 - protein, 6 aa, Artificial sequence
  synthetic peptide
TDMPDI

SEQ ID NO: 336 - protein, 6 aa, Artificial sequence
  synthetic peptide
DMPDIL

SEQ ID NO: 337 - protein, 6 aa, Artificial sequence
  synthetic peptide
MPDILL

SEQ ID NO: 338 - protein, 6 aa, Artificial sequence
  synthetic peptide
PDILLE

SEQ ID NO: 339 - protein, 6 aa, Artificial sequence
  synthetic peptide
DILLEL

SEQ ID NO: 340 - protein, 6 aa, Artificial sequence
  synthetic peptide
ILLELG

SEQ ID NO: 341 - protein, 6 aa, Artificial sequence
  synthetic peptide
LLELGQ

SEQ ID NO: 342 - protein, 6 aa, Artificial sequence
  synthetic peptide
LELGQF

SEQ ID NO: 343 - protein, 6 aa, Artificial sequence
  synthetic peptide
ELGQFK

SEQ ID NO: 344 - protein, 6 aa, Artificial sequence
  synthetic peptide
LGQFKK

SEQ ID NO: 345 - protein, 6 aa, Artificial sequence
  synthetic peptide
GQFKKT

SEQ ID NO: 346 - protein, 6 aa, Artificial sequence
  synthetic peptide
QFKKTQ

SEQ ID NO: 347 - protein, 6 aa, Artificial sequence
  synthetic peptide
FKKTQI

SEQ ID NO: 348 - protein, 6 aa, Artificial sequence
  synthetic peptide
KKTQIL

SEQ ID NO: 349 - protein, 6 aa, Artificial sequence
  synthetic peptide
KTQILV

SEQ ID NO: 350 - protein, 6 aa, Artificial sequence
  synthetic peptide
TQILVG

SEQ ID NO: 351 - protein, 6 aa, Artificial sequence
  synthetic peptide
QILVGV

SEQ ID NO: 352 - protein, 6 aa, Artificial sequence
  synthetic peptide
ILVGVN

SEQ ID NO: 353 - protein, 6 aa, Artificial sequence
  synthetic peptide
LVGVNK

SEQ ID NO: 354 - protein, 6 aa, Artificial sequence
  synthetic peptide
VGVNKD

SEQ ID NO: 355 - protein, 6 aa, Artificial sequence
  synthetic peptide
GVNKDE

SEQ ID NO: 356 - protein, 6 aa, Artificial sequence
  synthetic peptide
VNKDEG

SEQ ID NO: 357 - protein, 6 aa, Artificial sequence
  synthetic peptide
NKDEGT

SEQ ID NO: 358 - protein, 6 aa, Artificial sequence
  synthetic peptide
KDEGTA

SEQ ID NO: 359 - protein, 6 aa, Artificial sequence
  synthetic peptide
DEGTAF

SEQ ID NO: 360 - protein, 6 aa, Artificial sequence
  synthetic peptide
EGTAFL

SEQ ID NO: 361 - protein, 6 aa, Artificial sequence
  synthetic peptide
GTAFLV

SEQ ID NO: 362 - protein, 6 aa, Artificial sequence
  synthetic peptide
TAFLVY

SEQ ID NO: 363 - protein, 6 aa, Artificial sequence
  synthetic peptide
AFLVYG

SEQ ID NO: 364 - protein, 6 aa, Artificial sequence
  synthetic peptide
FLVYGA

SEQ ID NO: 365 - protein, 6 aa, Artificial sequence
  synthetic peptide
LVYGAP

SEQ ID NO: 366 - protein, 6 aa, Artificial sequence
  synthetic peptide
VYGAPG

SEQ ID NO: 367 - protein, 6 aa, Artificial sequence
  synthetic peptide
YGAPGF

SEQ ID NO: 368 - protein, 6 aa, Artificial sequence
  synthetic peptide
GAPGFS

SEQ ID NO: 369 - protein, 6 aa, Artificial sequence
  synthetic peptide
APGFSK

SEQ ID NO: 370 - protein, 6 aa, Artificial sequence
  synthetic peptide
PGFSKD

SEQ ID NO: 371 - protein, 6 aa, Artificial sequence
  synthetic peptide
GFSKDN

SEQ ID NO: 372 - protein, 6 aa, Artificial sequence
  synthetic peptide
FSKDNN

SEQ ID NO: 373 - protein, 6 aa, Artificial sequence
  synthetic peptide
SKDNNS

SEQ ID NO: 374 - protein, 6 aa, Artificial sequence
  synthetic peptide
KDNNSI

SEQ ID NO: 375 - protein, 6 aa, Artificial sequence
  synthetic peptide
DNNSII

SEQ ID NO: 376 - protein, 6 aa, Artificial sequence
  synthetic peptide
NNSIIT

SEQ ID NO: 377 - protein, 6 aa, Artificial sequence
  synthetic peptide
NSIITR

SEQ ID NO: 378 - protein, 6 aa, Artificial sequence
  synthetic peptide
SIITRK

SEQ ID NO: 379 - protein, 6 aa, Artificial sequence
  synthetic peptide
IITRKE

SEQ ID NO: 380 - protein, 6 aa, Artificial sequence
  synthetic peptide
ITRKEF

SEQ ID NO: 381 - protein, 6 aa, Artificial sequence
  synthetic peptide
TRKEFQ

SEQ ID NO: 382 - protein, 6 aa, Artificial sequence
  synthetic peptide
RKEFQE

SEQ ID NO: 383 - protein, 6 aa, Artificial sequence
  synthetic peptide
KEFQEG

SEQ ID NO: 384 - protein, 6 aa, Artificial sequence
  synthetic peptide
EFQEGL

SEQ ID NO: 385 - protein, 6 aa, Artificial sequence
  synthetic peptide
FQEGLK

SEQ ID NO: 386 - protein, 6 aa, Artificial sequence
  synthetic peptide
QEGLKI

SEQ ID NO: 387 - protein, 6 aa, Artificial sequence
  synthetic peptide
EGLKIF

SEQ ID NO: 388 - protein, 6 aa, Artificial sequence
  synthetic peptide
GLKIFF

SEQ ID NO: 389 - protein, 6 aa, Artificial sequence
  synthetic peptide
LKIFFP

SEQ ID NO: 390 - protein, 6 aa, Artificial sequence
  synthetic peptide
KIFFPG

SEQ ID NO: 391 - protein, 6 aa, Artificial sequence
  synthetic peptide
IFFPGV

SEQ ID NO: 392 - protein, 6 aa, Artificial sequence
  synthetic peptide
FFPGVS

SEQ ID NO: 393 - protein, 6 aa, Artificial sequence
  synthetic peptide
FPGVSE

SEQ ID NO: 394 - protein, 6 aa, Artificial sequence
  synthetic peptide
PGVSEF

SEQ ID NO: 395 - protein, 6 aa, Artificial sequence
  synthetic peptide
GVSEFG

SEQ ID NO: 396 - protein, 6 aa, Artificial sequence
  synthetic peptide
VSEFGK

SEQ ID NO: 397 - protein, 6 aa, Artificial sequence
  synthetic peptide
SEFGKE

SEQ ID NO: 398 - protein, 6 aa, Artificial sequence
  synthetic peptide
EFGKES

SEQ ID NO: 399 - protein, 6 aa, Artificial sequence
  synthetic peptide
FGKESI

SEQ ID NO: 400 - protein, 6 aa, Artificial sequence
  synthetic peptide
GKESIL

SEQ ID NO: 401 - protein, 6 aa, Artificial sequence
  synthetic peptide
KESILF

SEQ ID NO: 402 - protein, 6 aa, Artificial sequence
  synthetic peptide
ESILFH

SEQ ID NO: 403 - protein, 6 aa, Artificial sequence
  synthetic peptide
SILFHY

SEQ ID NO: 404 - protein, 6 aa, Artificial sequence
  synthetic peptide
ILFHYT

SEQ ID NO: 405 - protein, 6 aa, Artificial sequence
  synthetic peptide
LFHYTD

SEQ ID NO: 406 - protein, 6 aa, Artificial sequence
  synthetic peptide
FHYTDW

SEQ ID NO: 407 - protein, 6 aa, Artificial sequence
  synthetic peptide
HYTDWV

SEQ ID NO: 408 - protein, 6 aa, Artificial sequence
  synthetic peptide
YTDWVD

SEQ ID NO: 409 - protein, 6 aa, Artificial sequence
  synthetic peptide
TDWVDD

SEQ ID NO: 410 - protein, 6 aa, Artificial sequence
  synthetic peptide
DWVDDQ

SEQ ID NO: 411 - protein, 6 aa, Artificial sequence
  synthetic peptide
WVDDQR

SEQ ID NO: 412 - protein, 6 aa, Artificial sequence
  synthetic peptide
VDDQRP

SEQ ID NO: 413 - protein, 6 aa, Artificial sequence
  synthetic peptide
DDQRPE

SEQ ID NO: 414 - protein, 6 aa, Artificial sequence
  synthetic peptide
DQRPEN

SEQ ID NO: 415 - protein, 6 aa, Artificial sequence
  synthetic peptide
QRPENY

SEQ ID NO: 416 - protein, 6 aa, Artificial sequence
  synthetic peptide
RPENYR

SEQ ID NO: 417 - protein, 6 aa, Artificial sequence
  synthetic peptide
PENYRE

SEQ ID NO: 418 - protein, 6 aa, Artificial sequence
  synthetic peptide
ENYREA

SEQ ID NO: 419 - protein, 6 aa, Artificial sequence
  synthetic peptide
NYREAL

SEQ ID NO: 420 - protein, 6 aa, Artificial sequence
  synthetic peptide
YREALG

SEQ ID NO: 421 - protein, 6 aa, Artificial sequence
  synthetic peptide
REALGD

SEQ ID NO: 422 - protein, 6 aa, Artificial sequence
  synthetic peptide
EALGDV

SEQ ID NO: 423 - protein, 6 aa, Artificial sequence
  synthetic peptide
ALGDVV

SEQ ID NO: 424 - protein, 6 aa, Artificial sequence
  synthetic peptide
LGDVVG

SEQ ID NO: 425 - protein, 6 aa, Artificial sequence
  synthetic peptide
GDVVGD

SEQ ID NO: 426 - protein, 6 aa, Artificial sequence
  synthetic peptide
DVVGDY

SEQ ID NO: 427 - protein, 6 aa, Artificial sequence
  synthetic peptide
VVGDYN

SEQ ID NO: 428 - protein, 6 aa, Artificial sequence
  synthetic peptide
VGDYNF

SEQ ID NO: 429 - protein, 6 aa, Artificial sequence
  synthetic peptide
GDYNFI

SEQ ID NO: 430 - protein, 6 aa, Artificial sequence
  synthetic peptide
DYNFIC

SEQ ID NO: 431 - protein, 6 aa, Artificial sequence
  synthetic peptide
YNFICP

SEQ ID NO: 432 - protein, 6 aa, Artificial sequence
  synthetic peptide
NFICPA

SEQ ID NO: 433 - protein, 6 aa, Artificial sequence
  synthetic peptide
FICPAL

SEQ ID NO: 434 - protein, 6 aa, Artificial sequence
  synthetic peptide
ICPALE

SEQ ID NO: 435 - protein, 6 aa, Artificial sequence
  synthetic peptide
CPALEF

SEQ ID NO: 436 - protein, 6 aa, Artificial sequence
  synthetic peptide
PALEFT

SEQ ID NO: 437 - protein, 6 aa, Artificial sequence
  synthetic peptide
ALEFTK

SEQ ID NO: 438 - protein, 6 aa, Artificial sequence
  synthetic peptide
LEFTKK

SEQ ID NO: 439 - protein, 6 aa, Artificial sequence
  synthetic peptide
EFTKKF

SEQ ID NO: 440 - protein, 6 aa, Artificial sequence
  synthetic peptide
FTKKFS

SEQ ID NO: 441 - protein, 6 aa, Artificial sequence
  synthetic peptide
TKKFSE

SEQ ID NO: 442 - protein, 6 aa, Artificial sequence
  synthetic peptide
KKFSEW

SEQ ID NO: 443 - protein, 6 aa, Artificial sequence
  synthetic peptide
KFSEWG

SEQ ID NO: 444 - protein, 6 aa, Artificial sequence
  synthetic peptide
FSEWGN

SEQ ID NO: 445 - protein, 6 aa, Artificial sequence
  synthetic peptide
SEWGNN

SEQ ID NO: 446 - protein, 6 aa, Artificial sequence
  synthetic peptide
EWGNNA

SEQ ID NO: 447 - protein, 6 aa, Artificial sequence
  synthetic peptide
WGNNAF

SEQ ID NO: 448 - protein, 6 aa, Artificial sequence
  synthetic peptide
GNNAFF

SEQ ID NO: 449 - protein, 6 aa, Artificial sequence
  synthetic peptide
NNAFFY

SEQ ID NO: 450 - protein, 6 aa, Artificial sequence
  synthetic peptide
NAFFYY

SEQ ID NO: 451 - protein, 6 aa, Artificial sequence
  synthetic peptide
AFFYYF

SEQ ID NO: 452 - protein, 6 aa, Artificial sequence
  synthetic peptide
FFYYFE

SEQ ID NO: 453 - protein, 6 aa, Artificial sequence
  synthetic peptide
FYYFEH

SEQ ID NO: 454 - protein, 6 aa, Artificial sequence
  synthetic peptide
YYFEHR

SEQ ID NO: 455 - protein, 6 aa, Artificial sequence
  synthetic peptide
YFEHRS

SEQ ID NO: 456 - protein, 6 aa, Artificial sequence
  synthetic peptide
FEHRSS

SEQ ID NO: 457 - protein, 6 aa, Artificial sequence
  synthetic peptide
EHRSSK

SEQ ID NO: 458 - protein, 6 aa, Artificial sequence
  synthetic peptide
HRSSKL

SEQ ID NO: 459 - protein, 6 aa, Artificial sequence
  synthetic peptide
RSSKLP

SEQ ID NO: 460 - protein, 6 aa, Artificial sequence
  synthetic peptide
SSKLPW

SEQ ID NO: 461 - protein, 6 aa, Artificial sequence
  synthetic peptide
SKLPWP

SEQ ID NO: 462 - protein, 6 aa, Artificial sequence
  synthetic peptide
KLPWPE

SEQ ID NO: 463 - protein, 6 aa, Artificial sequence
  synthetic peptide
LPWPEW

SEQ ID NO: 464 - protein, 6 aa, Artificial sequence
  synthetic peptide
PWPEWM

SEQ ID NO: 465 - protein, 6 aa, Artificial sequence
  synthetic peptide
WPEWMG

SEQ ID NO: 466 - protein, 6 aa, Artificial sequence
  synthetic peptide
PEWMGV

SEQ ID NO: 467 - protein, 6 aa, Artificial sequence
  synthetic peptide
EWMGVM

SEQ ID NO: 468 - protein, 6 aa, Artificial sequence
  synthetic peptide
WMGVMH

SEQ ID NO: 469 - protein, 6 aa, Artificial sequence
  synthetic peptide
MGVMHG

SEQ ID NO: 470 - protein, 6 aa, Artificial sequence
  synthetic peptide
GVMHGY

SEQ ID NO: 471 - protein, 6 aa, Artificial sequence
  synthetic peptide
VMHGYE

SEQ ID NO: 472 - protein, 6 aa, Artificial sequence
  synthetic peptide
MHGYEI

SEQ ID NO: 473 - protein, 6 aa, Artificial sequence
  synthetic peptide
HGYEIE

SEQ ID NO: 474 - protein, 6 aa, Artificial sequence
  synthetic peptide
GYEIEF

SEQ ID NO: 475 - protein, 6 aa, Artificial sequence
  synthetic peptide
YEIEFV

SEQ ID NO: 476 - protein, 6 aa, Artificial sequence
  synthetic peptide
EIEFVF

SEQ ID NO: 477 - protein, 6 aa, Artificial sequence
  synthetic peptide
IEFVFG

SEQ ID NO: 478 - protein, 6 aa, Artificial sequence
  synthetic peptide
EFVFGL

SEQ ID NO: 479 - protein, 6 aa, Artificial sequence
  synthetic peptide
FVFGLP

SEQ ID NO: 480 - protein, 6 aa, Artificial sequence
  synthetic peptide
VFGLPL

SEQ ID NO: 481 - protein, 6 aa, Artificial sequence
  synthetic peptide
FGLPLE

SEQ ID NO: 482 - protein, 6 aa, Artificial sequence
  synthetic peptide
GLPLER

SEQ ID NO: 483 - protein, 6 aa, Artificial sequence
  synthetic peptide
LPLERR

SEQ ID NO: 484 - protein, 6 aa, Artificial sequence
  synthetic peptide
PLERRD

SEQ ID NO: 485 - protein, 6 aa, Artificial sequence
  synthetic peptide
LERRDN

SEQ ID NO: 486 - protein, 6 aa, Artificial sequence
  synthetic peptide
ERRDNY

SEQ ID NO: 487 - protein, 6 aa, Artificial sequence
  synthetic peptide
RRDNYT

SEQ ID NO: 488 - protein, 6 aa, Artificial sequence
  synthetic peptide
RDNYTK

SEQ ID NO: 489 - protein, 6 aa, Artificial sequence
  synthetic peptide
DNYTKA

SEQ ID NO: 490 - protein, 6 aa, Artificial sequence
  synthetic peptide
NYTKAE

SEQ ID NO: 491 - protein, 6 aa, Artificial sequence
  synthetic peptide
YTKAEE

SEQ ID NO: 492 - protein, 6 aa, Artificial sequence
  synthetic peptide
TKAEEI

SEQ ID NO: 493 - protein, 6 aa, Artificial sequence
  synthetic peptide
KAEEIL

SEQ ID NO: 494 - protein, 6 aa, Artificial sequence
  synthetic peptide
AEEILS

SEQ ID NO: 495 - protein, 6 aa, Artificial sequence
  synthetic peptide
EEILSR

SEQ ID NO: 496 - protein, 6 aa, Artificial sequence
  synthetic peptide
EILSRS

SEQ ID NO: 497 - protein, 6 aa, Artificial sequence
  synthetic peptide
ILSRSI

SEQ ID NO: 498 - protein, 6 aa, Artificial sequence
  synthetic peptide
LSRSIV

SEQ ID NO: 499 - protein, 6 aa, Artificial sequence
  synthetic peptide
SRSIVK

SEQ ID NO: 500 - protein, 6 aa, Artificial sequence
  synthetic peptide
RSIVKR

SEQ ID NO: 501 - protein, 6 aa, Artificial sequence
  synthetic peptide
SIVKRW

SEQ ID NO: 502 - protein, 6 aa, Artificial sequence
  synthetic peptide
IVKRWA

SEQ ID NO: 503 - protein, 6 aa, Artificial sequence
  synthetic peptide
VKRWAN

SEQ ID NO: 504 - protein, 6 aa, Artificial sequence
  synthetic peptide
KRWANF

SEQ ID NO: 505 - protein, 6 aa, Artificial sequence
  synthetic peptide
RWANFA

SEQ ID NO: 506 - protein, 6 aa, Artificial sequence
  synthetic peptide
WANFAK

SEQ ID NO: 507 - protein, 6 aa, Artificial sequence
  synthetic peptide
ANFAKY

SEQ ID NO: 508 - protein, 6 aa, Artificial sequence
  synthetic peptide
NFAKYG

SEQ ID NO: 509 - protein, 6 aa, Artificial sequence
  synthetic peptide
FAKYGN

SEQ ID NO: 510 - protein, 6 aa, Artificial sequence
  synthetic peptide
AKYGNP

SEQ ID NO: 511 - protein, 6 aa, Artificial sequence
  synthetic peptide
KYGNPN

SEQ ID NO: 512 - protein, 6 aa, Artificial sequence
  synthetic peptide
YGNPNE

SEQ ID NO: 513 - protein, 6 aa, Artificial sequence
  synthetic peptide
GNPNET

SEQ ID NO: 514 - protein, 6 aa, Artificial sequence
  synthetic peptide
NPNETQ

SEQ ID NO: 515 - protein, 6 aa, Artificial sequence
  synthetic peptide
PNETQN

SEQ ID NO: 516 - protein, 6 aa, Artificial sequence
  synthetic peptide
NETQNN

SEQ ID NO: 517 - protein, 6 aa, Artificial sequence
  synthetic peptide
ETQNNS

SEQ ID NO: 518 - protein, 6 aa, Artificial sequence
  synthetic peptide
TQNNST

SEQ ID NO: 519 - protein, 6 aa, Artificial sequence
  synthetic peptide
QNNSTS

SEQ ID NO: 520 - protein, 6 aa, Artificial sequence
  synthetic peptide
NNSTSW

SEQ ID NO: 521 - protein, 6 aa, Artificial sequence
  synthetic peptide
NSTSWP

SEQ ID NO: 522 - protein, 6 aa, Artificial sequence
  synthetic peptide
STSWPV

SEQ ID NO: 523 - protein, 6 aa, Artificial sequence
  synthetic peptide
TSWPVF

SEQ ID NO: 524 - protein, 6 aa, Artificial sequence
  synthetic peptide
SWPVFK

SEQ ID NO: 525 - protein, 6 aa, Artificial sequence
  synthetic peptide
WPVFKS

SEQ ID NO: 526 - protein, 6 aa, Artificial sequence
  synthetic peptide
PVFKST

SEQ ID NO: 527 - protein, 6 aa, Artificial sequence
  synthetic peptide
VFKSTE

SEQ ID NO: 528 - protein, 6 aa, Artificial sequence
  synthetic peptide
FKSTEQ

SEQ ID NO: 529 - protein, 6 aa, Artificial sequence
  synthetic peptide
KSTEQK

SEQ ID NO: 530 - protein, 6 aa, Artificial sequence
  synthetic peptide
STEQKY

SEQ ID NO: 531 - protein, 6 aa, Artificial sequence
  synthetic peptide
TEQKYL

SEQ ID NO: 532 - protein, 6 aa, Artificial sequence
  synthetic peptide
EQKYLT

SEQ ID NO: 533 - protein, 6 aa, Artificial sequence
  synthetic peptide
QKYLTL

SEQ ID NO: 534 - protein, 6 aa, Artificial sequence
  synthetic peptide
KYLTLN

SEQ ID NO: 535 - protein, 6 aa, Artificial sequence
  synthetic peptide
YLTLNT

SEQ ID NO: 536 - protein, 6 aa, Artificial sequence
  synthetic peptide
LTLNTE

SEQ ID NO: 537 - protein, 6 aa, Artificial sequence
  synthetic peptide
TLNTES

SEQ ID NO: 538 - protein, 6 aa, Artificial sequence
  synthetic peptide
LNTEST

SEQ ID NO: 539 - protein, 6 aa, Artificial sequence
  synthetic peptide
NTESTR

SEQ ID NO: 540 - protein, 6 aa, Artificial sequence
  synthetic peptide
TESTRI

SEQ ID NO: 541 - protein, 6 aa, Artificial sequence
  synthetic peptide
ESTRIM

SEQ ID NO: 542 - protein, 6 aa, Artificial sequence
  synthetic peptide
STRIMT

SEQ ID NO: 543 - protein, 6 aa, Artificial sequence
  synthetic peptide
TRIMTK

SEQ ID NO: 544 - protein, 6 aa, Artificial sequence
  synthetic peptide
RIMTKL

SEQ ID NO: 545 - protein, 6 aa, Artificial sequence
  synthetic peptide
IMTKLR

SEQ ID NO: 546 - protein, 6 aa, Artificial sequence
  synthetic peptide
MTKLRA

SEQ ID NO: 547 - protein, 6 aa, Artificial sequence
  synthetic peptide
TKLRAQ

SEQ ID NO: 548 - protein, 6 aa, Artificial sequence
  synthetic peptide
KLRAQQ

SEQ ID NO: 549 - protein, 6 aa, Artificial sequence
  synthetic peptide
LRAQQC

SEQ ID NO: 550 - protein, 6 aa, Artificial sequence
  synthetic peptide
RAQQCR

SEQ ID NO: 551 - protein, 6 aa, Artificial sequence
  synthetic peptide
AQQCRF

SEQ ID NO: 552 - protein, 6 aa, Artificial sequence
  synthetic peptide
QQCRFW

SEQ ID NO: 553 - protein, 6 aa, Artificial sequence
  synthetic peptide
QCRFWT

SEQ ID NO: 554 - protein, 6 aa, Artificial sequence
  synthetic peptide
CRFWTS

SEQ ID NO: 555 - protein, 6 aa, Artificial sequence
  synthetic peptide
RFWTSF

SEQ ID NO: 556 - protein, 6 aa, Artificial sequence
  synthetic peptide
FWTSFF

SEQ ID NO: 557 - protein, 6 aa, Artificial sequence
  synthetic peptide
WTSFFP

SEQ ID NO: 558 - protein, 6 aa, Artificial sequence
  synthetic peptide
TSFFPK

SEQ ID NO: 559 - protein, 6 aa, Artificial sequence
  synthetic peptide
SFFPKV

SEQ ID NO: 560 - protein, 6 aa, Artificial sequence
  synthetic peptide
FFPKVL

SEQ ID NO: 561 - protein, 6 aa, Artificial sequence
  synthetic peptide
FPKVLE

SEQ ID NO: 562 - protein, 6 aa, Artificial sequence
  synthetic peptide
PKVLEM

SEQ ID NO: 563 - protein, 6 aa, Artificial sequence
  synthetic peptide
KVLEMT

SEQ ID NO: 564 - protein, 6 aa, Artificial sequence
  synthetic peptide
VLEMTG

SEQ ID NO: 565 - protein, 6 aa, Artificial sequence
  synthetic peptide
LEMTGN

SEQ ID NO: 566 - protein, 6 aa, Artificial sequence
  synthetic peptide
EMTGNI

SEQ ID NO: 567 - protein, 6 aa, Artificial sequence
  synthetic peptide
MTGNID

SEQ ID NO: 568 - protein, 6 aa, Artificial sequence
  synthetic peptide
TGNIDE

SEQ ID NO: 569 - protein, 6 aa, Artificial sequence
  synthetic peptide
GNIDEA

SEQ ID NO: 570 - protein, 6 aa, Artificial sequence
  synthetic peptide
NIDEAE

SEQ ID NO: 571 - protein, 6 aa, Artificial sequence
  synthetic peptide
IDEAEW

SEQ ID NO: 572 - protein, 6 aa, Artificial sequence
  synthetic peptide
DEAEWE

SEQ ID NO: 573 - protein, 6 aa, Artificial sequence
  synthetic peptide
EAEWEW

SEQ ID NO: 574 - protein, 6 aa, Artificial sequence
  synthetic peptide
AEWEWK

SEQ ID NO: 575 - protein, 6 aa, Artificial sequence
  synthetic peptide
EWEWKA

SEQ ID NO: 576 - protein, 6 aa, Artificial sequence
  synthetic peptide
WEWKAG

SEQ ID NO: 577 - protein, 6 aa, Artificial sequence
  synthetic peptide
EWKAGF

SEQ ID NO: 578 - protein, 6 aa, Artificial sequence
  synthetic peptide
WKAGFH

SEQ ID NO: 579 - protein, 6 aa, Artificial sequence
  synthetic peptide
KAGFHR

SEQ ID NO: 580 - protein, 6 aa, Artificial sequence
  synthetic peptide
AGFHRW

SEQ ID NO: 581 - protein, 6 aa, Artificial sequence
  synthetic peptide
GFHRWN

SEQ ID NO: 582 - protein, 6 aa, Artificial sequence
  synthetic peptide
FHRWNN

SEQ ID NO: 583 - protein, 6 aa, Artificial sequence
  synthetic peptide
HRWNNY

SEQ ID NO: 584 - protein, 6 aa, Artificial sequence
  synthetic peptide
RWNNYM

SEQ ID NO: 585 - protein, 6 aa, Artificial sequence
  synthetic peptide
WNNYMM

SEQ ID NO: 586 - protein, 6 aa, Artificial sequence
  synthetic peptide
NNYMMD

SEQ ID NO: 587 - protein, 6 aa, Artificial sequence
  synthetic peptide
NYMMDW

SEQ ID NO: 588 - protein, 6 aa, Artificial sequence
  synthetic peptide
YMMDWK

SEQ ID NO: 589 - protein, 6 aa, Artificial sequence
  synthetic peptide
MMDWKN

SEQ ID NO: 590 - protein, 6 aa, Artificial sequence
  synthetic peptide
MDWKNQ

SEQ ID NO: 591 - protein, 6 aa, Artificial sequence
  synthetic peptide
DWKNQF

SEQ ID NO: 592 - protein, 6 aa, Artificial sequence
  synthetic peptide
WKNQFN

SEQ ID NO: 593 - protein, 6 aa, Artificial sequence
  synthetic peptide
KNQFND

SEQ ID NO: 594 - protein, 6 aa, Artificial sequence
  synthetic peptide
NQFNDY

SEQ ID NO: 595 - protein, 6 aa, Artificial sequence
  synthetic peptide
QFNDYT

SEQ ID NO: 596 - protein, 6 aa, Artificial sequence
  synthetic peptide
FNDYTS

SEQ ID NO: 597 - protein, 6 aa, Artificial sequence
  synthetic peptide
NDYTSK

SEQ ID NO: 598 - protein, 6 aa, Artificial sequence
  synthetic peptide
DYTSKK

SEQ ID NO: 599 - protein, 6 aa, Artificial sequence
  synthetic peptide
YTSKKE

SEQ ID NO: 600 - protein, 6 aa, Artificial sequence
  synthetic peptide
TSKKES

SEQ ID NO: 601 - protein, 6 aa, Artificial sequence
  synthetic peptide
SKKESC

SEQ ID NO: 602 - protein, 6 aa, Artificial sequence
  synthetic peptide
KKESCV

SEQ ID NO: 603 - protein, 6 aa, Artificial sequence
  synthetic peptide
KESCVG

SEQ ID NO: 604 - protein, 6 aa, Artificial sequence
  synthetic peptide
ESCVGL

SEQ ID NO: 605 - protein, 7 aa, Artificial sequence
  synthetic peptide
MHSKVTI

SEQ ID NO: 606 - protein, 7 aa, Artificial sequence
  synthetic peptide
HSKVTII

SEQ ID NO: 607 - protein, 7 aa, Artificial sequence
  synthetic peptide
SKVTIIC

SEQ ID NO: 608 - protein, 7 aa, Artificial sequence
  synthetic peptide
KVTIICI

SEQ ID NO: 609 - protein, 7 aa, Artificial sequence
  synthetic peptide
VTIICIR

SEQ ID NO: 610 - protein, 7 aa, Artificial sequence
  synthetic peptide
TIICIRF

SEQ ID NO: 611 - protein, 7 aa, Artificial sequence
  synthetic peptide
IICIRFL

SEQ ID NO: 612 - protein, 7 aa, Artificial sequence
  synthetic peptide
ICIRFLF

SEQ ID NO: 613 - protein, 7 aa, Artificial sequence
  synthetic peptide
CIRFLFW

SEQ ID NO: 614 - protein, 7 aa, Artificial sequence
  synthetic peptide
IRFLFWF

SEQ ID NO: 615 - protein, 7 aa, Artificial sequence
  synthetic peptide
RFLFWFL

SEQ ID NO: 616 - protein, 7 aa, Artificial sequence
  synthetic peptide
FLFWFLL

SEQ ID NO: 617 - protein, 7 aa, Artificial sequence
  synthetic peptide
LFWFLLL

SEQ ID NO: 618 - protein, 7 aa, Artificial sequence
  synthetic peptide
FWFLLLC

SEQ ID NO: 619 - protein, 7 aa, Artificial sequence
  synthetic peptide
WFLLLCM

SEQ ID NO: 620 - protein, 7 aa, Artificial sequence
  synthetic peptide
FLLLCML

SEQ ID NO: 621 - protein, 7 aa, Artificial sequence
  synthetic peptide
LLLCMLI

SEQ ID NO: 622 - protein, 7 aa, Artificial sequence
  synthetic peptide
LLCMLIG

SEQ ID NO: 623 - protein, 7 aa, Artificial sequence
  synthetic peptide
LCMLIGK

SEQ ID NO: 624 - protein, 7 aa, Artificial sequence
  synthetic peptide
CMLIGKS

SEQ ID NO: 625 - protein, 7 aa, Artificial sequence
  synthetic peptide
MLIGKSH

SEQ ID NO: 626 - protein, 7 aa, Artificial sequence
  synthetic peptide
LIGKSHT

SEQ ID NO: 627 - protein, 7 aa, Artificial sequence
  synthetic peptide
IGKSHTE

SEQ ID NO: 628 - protein, 7 aa, Artificial sequence
  synthetic peptide
GKSHTED

SEQ ID NO: 629 - protein, 7 aa, Artificial sequence
  synthetic peptide
KSHTEDD

SEQ ID NO: 630 - protein, 7 aa, Artificial sequence
  synthetic peptide
SHTEDDI

SEQ ID NO: 631 - protein, 7 aa, Artificial sequence
  synthetic peptide
HTEDDII

SEQ ID NO: 632 - protein, 7 aa, Artificial sequence
  synthetic peptide
TEDDIII

SEQ ID NO: 633 - protein, 7 aa, Artificial sequence
  synthetic peptide
EDDIIIA

SEQ ID NO: 634 - protein, 7 aa, Artificial sequence
  synthetic peptide
DDIIIAT

SEQ ID NO: 635 - protein, 7 aa, Artificial sequence
  synthetic peptide
DIIIATK

SEQ ID NO: 636 - protein, 7 aa, Artificial sequence
  synthetic peptide
IIIATKN

SEQ ID NO: 637 - protein, 7 aa, Artificial sequence
  synthetic peptide
IIATKNG

SEQ ID NO: 638 - protein, 7 aa, Artificial sequence
  synthetic peptide
IATKNGK

SEQ ID NO: 639 - protein, 7 aa, Artificial sequence
  synthetic peptide
ATKNGKV

SEQ ID NO: 640 - protein, 7 aa, Artificial sequence
  synthetic peptide
TKNGKVR

SEQ ID NO: 641 - protein, 7 aa, Artificial sequence
  synthetic peptide
KNGKVRG

SEQ ID NO: 642 - protein, 7 aa, Artificial sequence
  synthetic peptide
NGKVRGM

SEQ ID NO: 643 - protein, 7 aa, Artificial sequence
  synthetic peptide
GKVRGMN

SEQ ID NO: 644 - protein, 7 aa, Artificial sequence
  synthetic peptide
KVRGMNL

SEQ ID NO: 645 - protein, 7 aa, Artificial sequence
  synthetic peptide
VRGMNLT

SEQ ID NO: 646 - protein, 7 aa, Artificial sequence
  synthetic peptide
RGMNLTV

SEQ ID NO: 647 - protein, 7 aa, Artificial sequence
  synthetic peptide
GMNLTVF

SEQ ID NO: 648 - protein, 7 aa, Artificial sequence
  synthetic peptide
MNLTVFG

SEQ ID NO: 649 - protein, 7 aa, Artificial sequence
  synthetic peptide
NLTVFGG

SEQ ID NO: 650 - protein, 7 aa, Artificial sequence
  synthetic peptide
LTVFGGT

SEQ ID NO: 651 - protein, 7 aa, Artificial sequence
  synthetic peptide
TVFGGTV

SEQ ID NO: 652 - protein, 7 aa, Artificial sequence
  synthetic peptide
VFGGTVT

SEQ ID NO: 653 - protein, 7 aa, Artificial sequence
  synthetic peptide
FGGTVTA

SEQ ID NO: 654 - protein, 7 aa, Artificial sequence
  synthetic peptide
GGTVTAF

SEQ ID NO: 655 - protein, 7 aa, Artificial sequence
  synthetic peptide
GTVTAFL

SEQ ID NO: 656 - protein, 7 aa, Artificial sequence
  synthetic peptide
TVTAFLG

SEQ ID NO: 657 - protein, 7 aa, Artificial sequence
  synthetic peptide
VTAFLGI

SEQ ID NO: 658 - protein, 7 aa, Artificial sequence
  synthetic peptide
TAFLGIP

SEQ ID NO: 659 - protein, 7 aa, Artificial sequence
  synthetic peptide
AFLGIPY

SEQ ID NO: 660 - protein, 7 aa, Artificial sequence
  synthetic peptide
FLGIPYA

SEQ ID NO: 661 - protein, 7 aa, Artificial sequence
  synthetic peptide
LGIPYAQ

SEQ ID NO: 662 - protein, 7 aa, Artificial sequence
  synthetic peptide
GIPYAQP

SEQ ID NO: 663 - protein, 7 aa, Artificial sequence
  synthetic peptide
IPYAQPP

SEQ ID NO: 664 - protein, 7 aa, Artificial sequence
  synthetic peptide
PYAQPPL

SEQ ID NO: 665 - protein, 7 aa, Artificial sequence
  synthetic peptide
YAQPPLG

SEQ ID NO: 666 - protein, 7 aa, Artificial sequence
  synthetic peptide
AQPPLGR

SEQ ID NO: 667 - protein, 7 aa, Artificial sequence
  synthetic peptide
QPPLGRL

SEQ ID NO: 668 - protein, 7 aa, Artificial sequence
  synthetic peptide
PPLGRLR

SEQ ID NO: 669 - protein, 7 aa, Artificial sequence
  synthetic peptide
PLGRLRF

SEQ ID NO: 670 - protein, 7 aa, Artificial sequence
  synthetic peptide
LGRLRFK

SEQ ID NO: 671 - protein, 7 aa, Artificial sequence
  synthetic peptide
GRLRFKK

SEQ ID NO: 672 - protein, 7 aa, Artificial sequence
  synthetic peptide
RLRFKKP

SEQ ID NO: 673 - protein, 7 aa, Artificial sequence
  synthetic peptide
LRFKKPQ

SEQ ID NO: 674 - protein, 7 aa, Artificial sequence
  synthetic peptide
RFKKPQS

SEQ ID NO: 675 - protein, 7 aa, Artificial sequence
  synthetic peptide
FKKPQSL

SEQ ID NO: 676 - protein, 7 aa, Artificial sequence
  synthetic peptide
KKPQSLT

SEQ ID NO: 677 - protein, 7 aa, Artificial sequence
  synthetic peptide
KPQSLTK

SEQ ID NO: 678 - protein, 7 aa, Artificial sequence
  synthetic peptide
PQSLTKW

SEQ ID NO: 679 - protein, 7 aa, Artificial sequence
  synthetic peptide
QSLTKWS

SEQ ID NO: 680 - protein, 7 aa, Artificial sequence
  synthetic peptide
SLTKWSD

SEQ ID NO: 681 - protein, 7 aa, Artificial sequence
  synthetic peptide
LTKWSDI

SEQ ID NO: 682 - protein, 7 aa, Artificial sequence
  synthetic peptide
TKWSDIW

SEQ ID NO: 683 - protein, 7 aa, Artificial sequence
  synthetic peptide
KWSDIWN

SEQ ID NO: 684 - protein, 7 aa, Artificial sequence
  synthetic peptide
WSDIWNA

SEQ ID NO: 685 - protein, 7 aa, Artificial sequence
  synthetic peptide
SDIWNAT

SEQ ID NO: 686 - protein, 7 aa, Artificial sequence
  synthetic peptide
DIWNATK

SEQ ID NO: 687 - protein, 7 aa, Artificial sequence
  synthetic peptide
IWNATKY

SEQ ID NO: 688 - protein, 7 aa, Artificial sequence
  synthetic peptide
WNATKYA

SEQ ID NO: 689 - protein, 7 aa, Artificial sequence
  synthetic peptide
NATKYAN

SEQ ID NO: 690 - protein, 7 aa, Artificial sequence
  synthetic peptide
ATKYANS

SEQ ID NO: 691 - protein, 7 aa, Artificial sequence
  synthetic peptide
TKYANSC

SEQ ID NO: 692 - protein, 7 aa, Artificial sequence
  synthetic peptide
KYANSCC

SEQ ID NO: 693 - protein, 7 aa, Artificial sequence
  synthetic peptide
YANSCCQ

SEQ ID NO: 694 - protein, 7 aa, Artificial sequence
  synthetic peptide
ANSCCQN

SEQ ID NO: 695 - protein, 7 aa, Artificial sequence
  synthetic peptide
NSCCQNI

SEQ ID NO: 696 - protein, 7 aa, Artificial sequence
  synthetic peptide
SCCQNID

SEQ ID NO: 697 - protein, 7 aa, Artificial sequence
  synthetic peptide
CCQNIDQ

SEQ ID NO: 698 - protein, 7 aa, Artificial sequence
  synthetic peptide
CQNIDQS

SEQ ID NO: 699 - protein, 7 aa, Artificial sequence
  synthetic peptide
QNIDQSF

SEQ ID NO: 700 - protein, 7 aa, Artificial sequence
  synthetic peptide
NIDQSFP

SEQ ID NO: 701 - protein, 7 aa, Artificial sequence
  synthetic peptide
IDQSFPG

SEQ ID NO: 702 - protein, 7 aa, Artificial sequence
  synthetic peptide
DQSFPGF

SEQ ID NO: 703 - protein, 7 aa, Artificial sequence
  synthetic peptide
QSFPGFH

SEQ ID NO: 704 - protein, 7 aa, Artificial sequence
  synthetic peptide
SFPGFHG

SEQ ID NO: 705 - protein, 7 aa, Artificial sequence
  synthetic peptide
FPGFHGS

SEQ ID NO: 706 - protein, 7 aa, Artificial sequence
  synthetic peptide
PGFHGSE

SEQ ID NO: 707 - protein, 7 aa, Artificial sequence
  synthetic peptide
GFHGSEM

SEQ ID NO: 708 - protein, 7 aa, Artificial sequence
  synthetic peptide
FHGSEMW

SEQ ID NO: 709 - protein, 7 aa, Artificial sequence
  synthetic peptide
HGSEMWN

SEQ ID NO: 710 - protein, 7 aa, Artificial sequence
  synthetic peptide
GSEMWNP

SEQ ID NO: 711 - protein, 7 aa, Artificial sequence
  synthetic peptide
SEMWNPN

SEQ ID NO: 712 - protein, 7 aa, Artificial sequence
  synthetic peptide
EMWNPNT

SEQ ID NO: 713 - protein, 7 aa, Artificial sequence
  synthetic peptide
MWNPNTD

SEQ ID NO: 714 - protein, 7 aa, Artificial sequence
  synthetic peptide
WNPNTDL

SEQ ID NO: 715 - protein, 7 aa, Artificial sequence
  synthetic peptide
NPNTDLS

SEQ ID NO: 716 - protein, 7 aa, Artificial sequence
  synthetic peptide
PNTDLSE

SEQ ID NO: 717 - protein, 7 aa, Artificial sequence
  synthetic peptide
NTDLSED

SEQ ID NO: 718 - protein, 7 aa, Artificial sequence
  synthetic peptide
TDLSEDC

SEQ ID NO: 719 - protein, 7 aa, Artificial sequence
  synthetic peptide
DLSEDCL

SEQ ID NO: 720 - protein, 7 aa, Artificial sequence
  synthetic peptide
LSEDCLY

SEQ ID NO: 721 - protein, 7 aa, Artificial sequence
  synthetic peptide
SEDCLYL

SEQ ID NO: 722 - protein, 7 aa, Artificial sequence
  synthetic peptide
EDCLYLN

SEQ ID NO: 723 - protein, 7 aa, Artificial sequence
  synthetic peptide
DCLYLNV

SEQ ID NO: 724 - protein, 7 aa, Artificial sequence
  synthetic peptide
CLYLNVW

SEQ ID NO: 725 - protein, 7 aa, Artificial sequence
  synthetic peptide
LYLNVWI

SEQ ID NO: 726 - protein, 7 aa, Artificial sequence
  synthetic peptide
YLNVWIP

SEQ ID NO: 727 - protein, 7 aa, Artificial sequence
  synthetic peptide
LNVWIPA

SEQ ID NO: 728 - protein, 7 aa, Artificial sequence
  synthetic peptide
NVWIPAP

SEQ ID NO: 729 - protein, 7 aa, Artificial sequence
  synthetic peptide
VWIPAPK

SEQ ID NO: 730 - protein, 7 aa, Artificial sequence
  synthetic peptide
WIPAPKP

SEQ ID NO: 731 - protein, 7 aa, Artificial sequence
  synthetic peptide
IPAPKPK

SEQ ID NO: 732 - protein, 7 aa, Artificial sequence
  synthetic peptide
PAPKPKN

SEQ ID NO: 733 - protein, 7 aa, Artificial sequence
  synthetic peptide
APKPKNA

SEQ ID NO: 734 - protein, 7 aa, Artificial sequence
  synthetic peptide
PKPKNAT

SEQ ID NO: 735 - protein, 7 aa, Artificial sequence
  synthetic peptide
KPKNATV

SEQ ID NO: 736 - protein, 7 aa, Artificial sequence
  synthetic peptide
PKNATVL

SEQ ID NO: 737 - protein, 7 aa, Artificial sequence
  synthetic peptide
KNATVLI

SEQ ID NO: 738 - protein, 7 aa, Artificial sequence
  synthetic peptide
NATVLIW

SEQ ID NO: 739 - protein, 7 aa, Artificial sequence
  synthetic peptide
ATVLIWI

SEQ ID NO: 740 - protein, 7 aa, Artificial sequence
  synthetic peptide
TVLIWIY

SEQ ID NO: 741 - protein, 7 aa, Artificial sequence
  synthetic peptide
VLIWIYG

SEQ ID NO: 742 - protein, 7 aa, Artificial sequence
  synthetic peptide
LIWIYGG

SEQ ID NO: 743 - protein, 7 aa, Artificial sequence
  synthetic peptide
IWIYGGG

SEQ ID NO: 744 - protein, 7 aa, Artificial sequence
  synthetic peptide
WIYGGGF

SEQ ID NO: 745 - protein, 7 aa, Artificial sequence
  synthetic peptide
IYGGGFQ

SEQ ID NO: 746 - protein, 7 aa, Artificial sequence
  synthetic peptide
YGGGFQT

SEQ ID NO: 747 - protein, 7 aa, Artificial sequence
  synthetic peptide
GGGFQTG

SEQ ID NO: 748 - protein, 7 aa, Artificial sequence
  synthetic peptide
GGFQTGT

SEQ ID NO: 749 - protein, 7 aa, Artificial sequence
  synthetic peptide
GFQTGTS

SEQ ID NO: 750 - protein, 7 aa, Artificial sequence
  synthetic peptide
FQTGTSS

SEQ ID NO: 751 - protein, 7 aa, Artificial sequence
  synthetic peptide
QTGTSSL

SEQ ID NO: 752 - protein, 7 aa, Artificial sequence
  synthetic peptide
TGTSSLH

SEQ ID NO: 753 - protein, 7 aa, Artificial sequence
  synthetic peptide
GTSSLHV

SEQ ID NO: 754 - protein, 7 aa, Artificial sequence
  synthetic peptide
TSSLHVY

SEQ ID NO: 755 - protein, 7 aa, Artificial sequence
  synthetic peptide
SSLHVYD

SEQ ID NO: 756 - protein, 7 aa, Artificial sequence
  synthetic peptide
SLHVYDG

SEQ ID NO: 757 - protein, 7 aa, Artificial sequence
  synthetic peptide
LHVYDGK

SEQ ID NO: 758 - protein, 7 aa, Artificial sequence
  synthetic peptide
HVYDGKF

SEQ ID NO: 759 - protein, 7 aa, Artificial sequence
  synthetic peptide
VYDGKFL

SEQ ID NO: 760 - protein, 7 aa, Artificial sequence
  synthetic peptide
YDGKFLA

SEQ ID NO: 761 - protein, 7 aa, Artificial sequence
  synthetic peptide
DGKFLAR

SEQ ID NO: 762 - protein, 7 aa, Artificial sequence
  synthetic peptide
GKFLARV

SEQ ID NO: 763 - protein, 7 aa, Artificial sequence
  synthetic peptide
KFLARVE

SEQ ID NO: 764 - protein, 7 aa, Artificial sequence
  synthetic peptide
FLARVER

SEQ ID NO: 765 - protein, 7 aa, Artificial sequence
  synthetic peptide
LARVERV

SEQ ID NO: 766 - protein, 7 aa, Artificial sequence
  synthetic peptide
ARVERVI

SEQ ID NO: 767 - protein, 7 aa, Artificial sequence
  synthetic peptide
RVERVIV

SEQ ID NO: 768 - protein, 7 aa, Artificial sequence
  synthetic peptide
VERVIVV

SEQ ID NO: 769 - protein, 7 aa, Artificial sequence
  synthetic peptide
ERVIVVS

SEQ ID NO: 770 - protein, 7 aa, Artificial sequence
  synthetic peptide
RVIVVSM

SEQ ID NO: 771 - protein, 7 aa, Artificial sequence
  synthetic peptide
VIVVSMN

SEQ ID NO: 772 - protein, 7 aa, Artificial sequence
  synthetic peptide
IVVSMNY

SEQ ID NO: 773 - protein, 7 aa, Artificial sequence
  synthetic peptide
VVSMNYR

SEQ ID NO: 774 - protein, 7 aa, Artificial sequence
  synthetic peptide
VSMNYRV

SEQ ID NO: 775 - protein, 7 aa, Artificial sequence
  synthetic peptide
SMNYRVG

SEQ ID NO: 776 - protein, 7 aa, Artificial sequence
  synthetic peptide
MNYRVGA

SEQ ID NO: 777 - protein, 7 aa, Artificial sequence
  synthetic peptide
NYRVGAL

SEQ ID NO: 778 - protein, 7 aa, Artificial sequence
  synthetic peptide
YRVGALG

SEQ ID NO: 779 - protein, 7 aa, Artificial sequence
  synthetic peptide
RVGALGF

SEQ ID NO: 780 - protein, 7 aa, Artificial sequence
  synthetic peptide
VGALGFL

SEQ ID NO: 781 - protein, 7 aa, Artificial sequence
  synthetic peptide
GALGFLA

SEQ ID NO: 782 - protein, 7 aa, Artificial sequence
  synthetic peptide
ALGFLAL

SEQ ID NO: 783 - protein, 7 aa, Artificial sequence
  synthetic peptide
LGFLALP

SEQ ID NO: 784 - protein, 7 aa, Artificial sequence
  synthetic peptide
GFLALPG

SEQ ID NO: 785 - protein, 7 aa, Artificial sequence
  synthetic peptide
FLALPGN

SEQ ID NO: 786 - protein, 7 aa, Artificial sequence
  synthetic peptide
LALPGNP

SEQ ID NO: 787 - protein, 7 aa, Artificial sequence
  synthetic peptide
ALPGNPE

SEQ ID NO: 788 - protein, 7 aa, Artificial sequence
  synthetic peptide
LPGNPEA

SEQ ID NO: 789 - protein, 7 aa, Artificial sequence
  synthetic peptide
PGNPEAP

SEQ ID NO: 790 - protein, 7 aa, Artificial sequence
  synthetic peptide
GNPEAPG

SEQ ID NO: 791 - protein, 7 aa, Artificial sequence
  synthetic peptide
NPEAPGN

SEQ ID NO: 792 - protein, 7 aa, Artificial sequence
  synthetic peptide
PEAPGNM

SEQ ID NO: 793 - protein, 7 aa, Artificial sequence
  synthetic peptide
EAPGNMG

SEQ ID NO: 794 - protein, 7 aa, Artificial sequence
  synthetic peptide
APGNMGL

SEQ ID NO: 795 - protein, 7 aa, Artificial sequence
  synthetic peptide
PGNMGLF

SEQ ID NO: 796 - protein, 7 aa, Artificial sequence
  synthetic peptide
GNMGLFD

SEQ ID NO: 797 - protein, 7 aa, Artificial sequence
  synthetic peptide
NMGLFDQ

SEQ ID NO: 798 - protein, 7 aa, Artificial sequence
  synthetic peptide
MGLFDQQ

SEQ ID NO: 799 - protein, 7 aa, Artificial sequence
  synthetic peptide
GLFDQQL

SEQ ID NO: 800 - protein, 7 aa, Artificial sequence
  synthetic peptide
LFDQQLA

SEQ ID NO: 801 - protein, 7 aa, Artificial sequence
  synthetic peptide
FDQQLAL

SEQ ID NO: 802 - protein, 7 aa, Artificial sequence
  synthetic peptide
DQQLALQ

SEQ ID NO: 803 - protein, 7 aa, Artificial sequence
  synthetic peptide
QQLALQW

SEQ ID NO: 804 - protein, 7 aa, Artificial sequence
  synthetic peptide
QLALQWV

SEQ ID NO: 805 - protein, 7 aa, Artificial sequence
  synthetic peptide
LALQWVQ

SEQ ID NO: 806 - protein, 7 aa, Artificial sequence
  synthetic peptide
ALQWVQK

SEQ ID NO: 807 - protein, 7 aa, Artificial sequence
  synthetic peptide
LQWVQKN

SEQ ID NO: 808 - protein, 7 aa, Artificial sequence
  synthetic peptide
QWVQKNI

SEQ ID NO: 809 - protein, 7 aa, Artificial sequence
  synthetic peptide
WVQKNIA

SEQ ID NO: 810 - protein, 7 aa, Artificial sequence
  synthetic peptide
VQKNIAA

SEQ ID NO: 811 - protein, 7 aa, Artificial sequence
  synthetic peptide
QKNIAAF

SEQ ID NO: 812 - protein, 7 aa, Artificial sequence
  synthetic peptide
KNIAAFG

SEQ ID NO: 813 - protein, 7 aa, Artificial sequence
  synthetic peptide
NIAAFGG

SEQ ID NO: 814 - protein, 7 aa, Artificial sequence
  synthetic peptide
IAAFGGN

SEQ ID NO: 815 - protein, 7 aa, Artificial sequence
  synthetic peptide
AAFGGNP

SEQ ID NO: 816 - protein, 7 aa, Artificial sequence
  synthetic peptide
AFGGNPK

SEQ ID NO: 817 - protein, 7 aa, Artificial sequence
  synthetic peptide
FGGNPKS

SEQ ID NO: 818 - protein, 7 aa, Artificial sequence
  synthetic peptide
GGNPKSV

SEQ ID NO: 819 - protein, 7 aa, Artificial sequence
  synthetic peptide
GNPKSVT

SEQ ID NO: 820 - protein, 7 aa, Artificial sequence
  synthetic peptide
NPKSVTL

SEQ ID NO: 821 - protein, 7 aa, Artificial sequence
  synthetic peptide
PKSVTLF

SEQ ID NO: 822 - protein, 7 aa, Artificial sequence
  synthetic peptide
KSVTLFG

SEQ ID NO: 823 - protein, 7 aa, Artificial sequence
  synthetic peptide
SVTLFGE

SEQ ID NO: 824 - protein, 7 aa, Artificial sequence
  synthetic peptide
VTLFGES

SEQ ID NO: 825 - protein, 7 aa, Artificial sequence
  synthetic peptide
TLFGESA

SEQ ID NO: 826 - protein, 7 aa, Artificial sequence
  synthetic peptide
LFGESAG

SEQ ID NO: 827 - protein, 7 aa, Artificial sequence
  synthetic peptide
FGESAGA

SEQ ID NO: 828 - protein, 7 aa, Artificial sequence
  synthetic peptide
GESAGAA

SEQ ID NO: 829 - protein, 7 aa, Artificial sequence
  synthetic peptide
ESAGAAS

SEQ ID NO: 830 - protein, 7 aa, Artificial sequence
  synthetic peptide
SAGAASV

SEQ ID NO: 831 - protein, 7 aa, Artificial sequence
  synthetic peptide
AGAASVS

SEQ ID NO: 832 - protein, 7 aa, Artificial sequence
  synthetic peptide
GAASVSL

SEQ ID NO: 833 - protein, 7 aa, Artificial sequence
  synthetic peptide
AASVSLH

SEQ ID NO: 834 - protein, 7 aa, Artificial sequence
  synthetic peptide
ASVSLHL

SEQ ID NO: 835 - protein, 7 aa, Artificial sequence
  synthetic peptide
SVSLHLL

SEQ ID NO: 836 - protein, 7 aa, Artificial sequence
  synthetic peptide
VSLHLLS

SEQ ID NO: 837 - protein, 7 aa, Artificial sequence
  synthetic peptide
SLHLLSP

SEQ ID NO: 838 - protein, 7 aa, Artificial sequence
  synthetic peptide
LHLLSPG

SEQ ID NO: 839 - protein, 7 aa, Artificial sequence
  synthetic peptide
HLLSPGS

SEQ ID NO: 840 - protein, 7 aa, Artificial sequence
  synthetic peptide
LLSPGSH

SEQ ID NO: 841 - protein, 7 aa, Artificial sequence
  synthetic peptide
LSPGSHS

SEQ ID NO: 842 - protein, 7 aa, Artificial sequence
  synthetic peptide
SPGSHSL

SEQ ID NO: 843 - protein, 7 aa, Artificial sequence
  synthetic peptide
PGSHSLF

SEQ ID NO: 844 - protein, 7 aa, Artificial sequence
  synthetic peptide
GSHSLFT

SEQ ID NO: 845 - protein, 7 aa, Artificial sequence
  synthetic peptide
SHSLFTR

SEQ ID NO: 846 - protein, 7 aa, Artificial sequence
  synthetic peptide
HSLFTRA

SEQ ID NO: 847 - protein, 7 aa, Artificial sequence
  synthetic peptide
SLFTRAI

SEQ ID NO: 848 - protein, 7 aa, Artificial sequence
  synthetic peptide
LFTRAIL

SEQ ID NO: 849 - protein, 7 aa, Artificial sequence
  synthetic peptide
FTRAILQ

SEQ ID NO: 850 - protein, 7 aa, Artificial sequence
  synthetic peptide
TRAILQS

SEQ ID NO: 851 - protein, 7 aa, Artificial sequence
  synthetic peptide
RAILQSG

SEQ ID NO: 852 - protein, 7 aa, Artificial sequence
  synthetic peptide
AILQSGS

SEQ ID NO: 853 - protein, 7 aa, Artificial sequence
  synthetic peptide
ILQSGSF

SEQ ID NO: 854 - protein, 7 aa, Artificial sequence
  synthetic peptide
LQSGSFN

SEQ ID NO: 855 - protein, 7 aa, Artificial sequence
  synthetic peptide
QSGSFNA

SEQ ID NO: 856 - protein, 7 aa, Artificial sequence
  synthetic peptide
SGSFNAP

SEQ ID NO: 857 - protein, 7 aa, Artificial sequence
  synthetic peptide
GSFNAPW

SEQ ID NO: 858 - protein, 7 aa, Artificial sequence
  synthetic peptide
SFNAPWA

SEQ ID NO: 859 - protein, 7 aa, Artificial sequence
  synthetic peptide
FNAPWAV

SEQ ID NO: 860 - protein, 7 aa, Artificial sequence
  synthetic peptide
NAPWAVT

SEQ ID NO: 861 - protein, 7 aa, Artificial sequence
  synthetic peptide
APWAVTS

SEQ ID NO: 862 - protein, 7 aa, Artificial sequence
  synthetic peptide
PWAVTSL

SEQ ID NO: 863 - protein, 7 aa, Artificial sequence
  synthetic peptide
WAVTSLY

SEQ ID NO: 864 - protein, 7 aa, Artificial sequence
  synthetic peptide
AVTSLYE

SEQ ID NO: 865 - protein, 7 aa, Artificial sequence
  synthetic peptide
VTSLYEA

SEQ ID NO: 866 - protein, 7 aa, Artificial sequence
  synthetic peptide
TSLYEAR

SEQ ID NO: 867 - protein, 7 aa, Artificial sequence
  synthetic peptide
SLYEARN

SEQ ID NO: 868 - protein, 7 aa, Artificial sequence
  synthetic peptide
LYEARNR

SEQ ID NO: 869 - protein, 7 aa, Artificial sequence
  synthetic peptide
YEARNRT

SEQ ID NO: 870 - protein, 7 aa, Artificial sequence
  synthetic peptide
EARNRTL

SEQ ID NO: 871 - protein, 7 aa, Artificial sequence
  synthetic peptide
ARNRTLN

SEQ ID NO: 872 - protein, 7 aa, Artificial sequence
  synthetic peptide
RNRTLNL

SEQ ID NO: 873 - protein, 7 aa, Artificial sequence
  synthetic peptide
NRTLNLA

SEQ ID NO: 874 - protein, 7 aa, Artificial sequence
  synthetic peptide
RTLNLAK

SEQ ID NO: 875 - protein, 7 aa, Artificial sequence
  synthetic peptide
TLNLAKL

SEQ ID NO: 876 - protein, 7 aa, Artificial sequence
  synthetic peptide
LNLAKLT

SEQ ID NO: 877 - protein, 7 aa, Artificial sequence
  synthetic peptide
NLAKLTG

SEQ ID NO: 878 - protein, 7 aa, Artificial sequence
  synthetic peptide
LAKLTGC

SEQ ID NO: 879 - protein, 7 aa, Artificial sequence
  synthetic peptide
AKLTGCS

SEQ ID NO: 880 - protein, 7 aa, Artificial sequence
  synthetic peptide
KLTGCSR

SEQ ID NO: 881 - protein, 7 aa, Artificial sequence
  synthetic peptide
LTGCSRE

SEQ ID NO: 882 - protein, 7 aa, Artificial sequence
  synthetic peptide
TGCSREN

SEQ ID NO: 883 - protein, 7 aa, Artificial sequence
  synthetic peptide
GCSRENE

SEQ ID NO: 884 - protein, 7 aa, Artificial sequence
  synthetic peptide
CSRENET

SEQ ID NO: 885 - protein, 7 aa, Artificial sequence
  synthetic peptide
SRENETE

SEQ ID NO: 886 - protein, 7 aa, Artificial sequence
  synthetic peptide
RENETEI

SEQ ID NO: 887 - protein, 7 aa, Artificial sequence
  synthetic peptide
ENETEII

SEQ ID NO: 888 - protein, 7 aa, Artificial sequence
  synthetic peptide
NETEIIK

SEQ ID NO: 889 - protein, 7 aa, Artificial sequence
  synthetic peptide
ETEIIKC

SEQ ID NO: 890 - protein, 7 aa, Artificial sequence
  synthetic peptide
TEIIKCL

SEQ ID NO: 891 - protein, 7 aa, Artificial sequence
  synthetic peptide
EIIKCLR

SEQ ID NO: 892 - protein, 7 aa, Artificial sequence
  synthetic peptide
IIKCLRN

SEQ ID NO: 893 - protein, 7 aa, Artificial sequence
  synthetic peptide
IKCLRNK

SEQ ID NO: 894 - protein, 7 aa, Artificial sequence
  synthetic peptide
KCLRNKD

SEQ ID NO: 895 - protein, 7 aa, Artificial sequence
  synthetic peptide
CLRNKDP

SEQ ID NO: 896 - protein, 7 aa, Artificial sequence
  synthetic peptide
LRNKDPQ

SEQ ID NO: 897 - protein, 7 aa, Artificial sequence
  synthetic peptide
RNKDPQE

SEQ ID NO: 898 - protein, 7 aa, Artificial sequence
  synthetic peptide
NKDPQEI

SEQ ID NO: 899 - protein, 7 aa, Artificial sequence
  synthetic peptide
KDPQEIL

SEQ ID NO: 900 - protein, 7 aa, Artificial sequence
  synthetic peptide
DPQEILL

SEQ ID NO: 901 - protein, 7 aa, Artificial sequence
  synthetic peptide
PQEILLN

SEQ ID NO: 902 - protein, 7 aa, Artificial sequence
  synthetic peptide
QEILLNE

SEQ ID NO: 903 - protein, 7 aa, Artificial sequence
  synthetic peptide
EILLNEA

SEQ ID NO: 904 - protein, 7 aa, Artificial sequence
  synthetic peptide
ILLNEAF

SEQ ID NO: 905 - protein, 7 aa, Artificial sequence
  synthetic peptide
LLNEAFV

SEQ ID NO: 906 - protein, 7 aa, Artificial sequence
  synthetic peptide
LNEAFVV

SEQ ID NO: 907 - protein, 7 aa, Artificial sequence
  synthetic peptide
NEAFVVP

SEQ ID NO: 908 - protein, 7 aa, Artificial sequence
  synthetic peptide
EAFVVPY

SEQ ID NO: 909 - protein, 7 aa, Artificial sequence
  synthetic peptide
AFVVPYG

SEQ ID NO: 910 - protein, 7 aa, Artificial sequence
  synthetic peptide
FVVPYGT

SEQ ID NO: 911 - protein, 7 aa, Artificial sequence
  synthetic peptide
VVPYGTP

SEQ ID NO: 912 - protein, 7 aa, Artificial sequence
  synthetic peptide
VPYGTPL

SEQ ID NO: 913 - protein, 7 aa, Artificial sequence
  synthetic peptide
PYGTPLS

SEQ ID NO: 914 - protein, 7 aa, Artificial sequence
  synthetic peptide
YGTPLSV

SEQ ID NO: 915 - protein, 7 aa, Artificial sequence
  synthetic peptide
GTPLSVN

SEQ ID NO: 916 - protein, 7 aa, Artificial sequence
  synthetic peptide
TPLSVNF

SEQ ID NO: 917 - protein, 7 aa, Artificial sequence
  synthetic peptide
PLSVNFG

SEQ ID NO: 918 - protein, 7 aa, Artificial sequence
  synthetic peptide
LSVNFGP

SEQ ID NO: 919 - protein, 7 aa, Artificial sequence
  synthetic peptide
SVNFGPT

SEQ ID NO: 920 - protein, 7 aa, Artificial sequence
  synthetic peptide
VNFGPTV

SEQ ID NO: 921 - protein, 7 aa, Artificial sequence
  synthetic peptide
NFGPTVD

SEQ ID NO: 922 - protein, 7 aa, Artificial sequence
  synthetic peptide
FGPTVDG

SEQ ID NO: 923 - protein, 7 aa, Artificial sequence
  synthetic peptide
GPTVDGD

SEQ ID NO: 924 - protein, 7 aa, Artificial sequence
  synthetic peptide
PTVDGDF

SEQ ID NO: 925 - protein, 7 aa, Artificial sequence
  synthetic peptide
TVDGDFL

SEQ ID NO: 926 - protein, 7 aa, Artificial sequence
  synthetic peptide
VDGDFLT

SEQ ID NO: 927 - protein, 7 aa, Artificial sequence
  synthetic peptide
DGDFLTD

SEQ ID NO: 928 - protein, 7 aa, Artificial sequence
  synthetic peptide
GDFLTDM

SEQ ID NO: 929 - protein, 7 aa, Artificial sequence
  synthetic peptide
DFLTDMP

SEQ ID NO: 930 - protein, 7 aa, Artificial sequence
  synthetic peptide
FLTDMPD

SEQ ID NO: 931 - protein, 7 aa, Artificial sequence
  synthetic peptide
LTDMPDI

SEQ ID NO: 932 - protein, 7 aa, Artificial sequence
  synthetic peptide
TDMPDIL

SEQ ID NO: 933 - protein, 7 aa, Artificial sequence
  synthetic peptide
DMPDILL

SEQ ID NO: 934 - protein, 7 aa, Artificial sequence
  synthetic peptide
MPDILLE

SEQ ID NO: 935 - protein, 7 aa, Artificial sequence
  synthetic peptide
PDILLEL

SEQ ID NO: 936 - protein, 7 aa, Artificial sequence
  synthetic peptide
DILLELG

SEQ ID NO: 937 - protein, 7 aa, Artificial sequence
  synthetic peptide
ILLELGQ

SEQ ID NO: 938 - protein, 7 aa, Artificial sequence
  synthetic peptide
LLELGQF

SEQ ID NO: 939 - protein, 7 aa, Artificial sequence
  synthetic peptide
LELGQFK

SEQ ID NO: 940 - protein, 7 aa, Artificial sequence
  synthetic peptide
ELGQFKK

SEQ ID NO: 941 - protein, 7 aa, Artificial sequence
  synthetic peptide
LGQFKKT

SEQ ID NO: 942 - protein, 7 aa, Artificial sequence
  synthetic peptide
GQFKKTQ

SEQ ID NO: 943 - protein, 7 aa, Artificial sequence
  synthetic peptide
QFKKTQI

SEQ ID NO: 944 - protein, 7 aa, Artificial sequence
  synthetic peptide
FKKTQIL

SEQ ID NO: 945 - protein, 7 aa, Artificial sequence
  synthetic peptide
KKTQILV

SEQ ID NO: 946 - protein, 7 aa, Artificial sequence
  synthetic peptide
KTQILVG

SEQ ID NO: 947 - protein, 7 aa, Artificial sequence
  synthetic peptide
TQILVGV

SEQ ID NO: 948 - protein, 7 aa, Artificial sequence
  synthetic peptide
QILVGVN

SEQ ID NO: 949 - protein, 7 aa, Artificial sequence
  synthetic peptide
ILVGVNK

SEQ ID NO: 950 - protein, 7 aa, Artificial sequence
  synthetic peptide
LVGVNKD

SEQ ID NO: 951 - protein, 7 aa, Artificial sequence
  synthetic peptide
VGVNKDE

SEQ ID NO: 952 - protein, 7 aa, Artificial sequence
  synthetic peptide
GVNKDEG

SEQ ID NO: 953 - protein, 7 aa, Artificial sequence
  synthetic peptide
VNKDEGT

SEQ ID NO: 954 - protein, 7 aa, Artificial sequence
  synthetic peptide
NKDEGTA

SEQ ID NO: 955 - protein, 7 aa, Artificial sequence
  synthetic peptide
KDEGTAF

SEQ ID NO: 956 - protein, 7 aa, Artificial sequence
  synthetic peptide
DEGTAFL

SEQ ID NO: 957 - protein, 7 aa, Artificial sequence
  synthetic peptide
EGTAFLV

SEQ ID NO: 958 - protein, 7 aa, Artificial sequence
  synthetic peptide
GTAFLVY

SEQ ID NO: 959 - protein, 7 aa, Artificial sequence
  synthetic peptide
TAFLVYG

SEQ ID NO: 960 - protein, 7 aa, Artificial sequence
  synthetic peptide
AFLVYGA

SEQ ID NO: 961 - protein, 7 aa, Artificial sequence
  synthetic peptide
FLVYGAP

SEQ ID NO: 962 - protein, 7 aa, Artificial sequence
  synthetic peptide
LVYGAPG

SEQ ID NO: 963 - protein, 7 aa, Artificial sequence
  synthetic peptide
VYGAPGF

SEQ ID NO: 964 - protein, 7 aa, Artificial sequence
  synthetic peptide
YGAPGFS

SEQ ID NO: 965 - protein, 7 aa, Artificial sequence
  synthetic peptide
GAPGFSK

SEQ ID NO: 966 - protein, 7 aa, Artificial sequence
  synthetic peptide
APGFSKD

SEQ ID NO: 967 - protein, 7 aa, Artificial sequence
  synthetic peptide
PGFSKDN

SEQ ID NO: 968 - protein, 7 aa, Artificial sequence
  synthetic peptide
GFSKDNN

SEQ ID NO: 969 - protein, 7 aa, Artificial sequence
  synthetic peptide
FSKDNNS

SEQ ID NO: 970 - protein, 7 aa, Artificial sequence
  synthetic peptide
SKDNNSI

SEQ ID NO: 971 - protein, 7 aa, Artificial sequence
  synthetic peptide
KDNNSII

SEQ ID NO: 972 - protein, 7 aa, Artificial sequence
  synthetic peptide
DNNSIIT

SEQ ID NO: 973 - protein, 7 aa, Artificial sequence
  synthetic peptide
NNSIITR

SEQ ID NO: 974 - protein, 7 aa, Artificial sequence
  synthetic peptide
NSIITRK

SEQ ID NO: 975 - protein, 7 aa, Artificial sequence
  synthetic peptide
SIITRKE

SEQ ID NO: 976 - protein, 7 aa, Artificial sequence
  synthetic peptide
IITRKEF

SEQ ID NO: 977 - protein, 7 aa, Artificial sequence
  synthetic peptide
ITRKEFQ

SEQ ID NO: 978 - protein, 7 aa, Artificial sequence
  synthetic peptide
TRKEFQE

SEQ ID NO: 979 - protein, 7 aa, Artificial sequence
  synthetic peptide
RKEFQEG

SEQ ID NO: 980 - protein, 7 aa, Artificial sequence
  synthetic peptide
KEFQEGL

SEQ ID NO: 981 - protein, 7 aa, Artificial sequence
  synthetic peptide
EFQEGLK

SEQ ID NO: 982 - protein, 7 aa, Artificial sequence
  synthetic peptide
FQEGLKI

SEQ ID NO: 983 - protein, 7 aa, Artificial sequence
  synthetic peptide
QEGLKIF

SEQ ID NO: 984 - protein, 7 aa, Artificial sequence
  synthetic peptide
EGLKIFF

SEQ ID NO: 985 - protein, 7 aa, Artificial sequence
  synthetic peptide
GLKIFFP

SEQ ID NO: 986 - protein, 7 aa, Artificial sequence
  synthetic peptide
LKIFFPG

SEQ ID NO: 987 - protein, 7 aa, Artificial sequence
  synthetic peptide
KIFFPGV

SEQ ID NO: 988 - protein, 7 aa, Artificial sequence
  synthetic peptide
IFFPGVS

SEQ ID NO: 989 - protein, 7 aa, Artificial sequence
  synthetic peptide
FFPGVSE

SEQ ID NO: 990 - protein, 7 aa, Artificial sequence
  synthetic peptide
FPGVSEF

SEQ ID NO: 991 - protein, 7 aa, Artificial sequence
  synthetic peptide
PGVSEFG

SEQ ID NO: 992 - protein, 7 aa, Artificial sequence
  synthetic peptide
GVSEFGK

SEQ ID NO: 993 - protein, 7 aa, Artificial sequence
  synthetic peptide
VSEFGKE

SEQ ID NO: 994 - protein, 7 aa, Artificial sequence
  synthetic peptide
SEFGKES

SEQ ID NO: 995 - protein, 7 aa, Artificial sequence
  synthetic peptide
EFGKESI

SEQ ID NO: 996 - protein, 7 aa, Artificial sequence
  synthetic peptide
FGKESIL

SEQ ID NO: 997 - protein, 7 aa, Artificial sequence
  synthetic peptide
GKESILF

SEQ ID NO: 998 - protein, 7 aa, Artificial sequence
  synthetic peptide
KESILFH

SEQ ID NO: 999 - protein, 7 aa, Artificial sequence
  synthetic peptide
ESILFHY

SEQ ID NO: 1000 - protein, 7 aa, Artificial sequence
  synthetic peptide
SILFHYT

SEQ ID NO: 1001 - protein, 7 aa, Artificial sequence
  synthetic peptide
ILFHYTD

SEQ ID NO: 1002 - protein, 7 aa, Artificial sequence
  synthetic peptide
LFHYTDW

SEQ ID NO: 1003 - protein, 7 aa, Artificial sequence
  synthetic peptide
FHYTDWV

SEQ ID NO: 1004 - protein, 7 aa, Artificial sequence
  synthetic peptide
HYTDWVD

SEQ ID NO: 1005 - protein, 7 aa, Artificial sequence
  synthetic peptide
YTDWVDD

SEQ ID NO: 1006 - protein, 7 aa, Artificial sequence
  synthetic peptide
TDWVDDQ

SEQ ID NO: 1007 - protein, 7 aa, Artificial sequence
  synthetic peptide
DWVDDQR

SEQ ID NO: 1008 - protein, 7 aa, Artificial sequence
  synthetic peptide
WVDDQRP

SEQ ID NO: 1009 - protein, 7 aa, Artificial sequence
  synthetic peptide
VDDQRPE

SEQ ID NO: 1010 - protein, 7 aa, Artificial sequence
  synthetic peptide
DDQRPEN

SEQ ID NO: 1011 - protein, 7 aa, Artificial sequence
  synthetic peptide
DQRPENY

SEQ ID NO: 1012 - protein, 7 aa, Artificial sequence
  synthetic peptide
QRPENYR

SEQ ID NO: 1013 - protein, 7 aa, Artificial sequence
  synthetic peptide
RPENYRE

SEQ ID NO: 1014 - protein, 7 aa, Artificial sequence
  synthetic peptide
PENYREA

SEQ ID NO: 1015 - protein, 7 aa, Artificial sequence
  synthetic peptide
ENYREAL

SEQ ID NO: 1016 - protein, 7 aa, Artificial sequence
  synthetic peptide
NYREALG

SEQ ID NO: 1017 - protein, 7 aa, Artificial sequence
  synthetic peptide
YREALGD

SEQ ID NO: 1018 - protein, 7 aa, Artificial sequence
  synthetic peptide
REALGDV

SEQ ID NO: 1019 - protein, 7 aa, Artificial sequence
  synthetic peptide
EALGDVV

SEQ ID NO: 1020 - protein, 7 aa, Artificial sequence
  synthetic peptide
ALGDVVG

SEQ ID NO: 1021 - protein, 7 aa, Artificial sequence
  synthetic peptide
LGDVVGD

SEQ ID NO: 1022 - protein, 7 aa, Artificial sequence
  synthetic peptide
GDVVGDY

SEQ ID NO: 1023 - protein, 7 aa, Artificial sequence
  synthetic peptide
DVVGDYN

SEQ ID NO: 1024 - protein, 7 aa, Artificial sequence
  synthetic peptide
VVGDYNF

SEQ ID NO: 1025 - protein, 7 aa, Artificial sequence
  synthetic peptide
VGDYNFI

SEQ ID NO: 1026 - protein, 7 aa, Artificial sequence
  synthetic peptide
GDYNFIC

SEQ ID NO: 1027 - protein, 7 aa, Artificial sequence
  synthetic peptide
DYNFICP

SEQ ID NO: 1028 - protein, 7 aa, Artificial sequence
  synthetic peptide
YNFICPA

SEQ ID NO: 1029 - protein, 7 aa, Artificial sequence
  synthetic peptide
NFICPAL

SEQ ID NO: 1030 - protein, 7 aa, Artificial sequence
  synthetic peptide
FICPALE

SEQ ID NO: 1031 - protein, 7 aa, Artificial sequence
  synthetic peptide
ICPALEF

SEQ ID NO: 1032 - protein, 7 aa, Artificial sequence
  synthetic peptide
CPALEFT

SEQ ID NO: 1033 - protein, 7 aa, Artificial sequence
  synthetic peptide
PALEFTK

SEQ ID NO: 1034 - protein, 7 aa, Artificial sequence
  synthetic peptide
ALEFTKK

SEQ ID NO: 1035 - protein, 7 aa, Artificial sequence
  synthetic peptide
LEFTKKF

SEQ ID NO: 1036 - protein, 7 aa, Artificial sequence
  synthetic peptide
EFTKKFS

SEQ ID NO: 1037 - protein, 7 aa, Artificial sequence
  synthetic peptide
FTKKFSE

SEQ ID NO: 1038 - protein, 7 aa, Artificial sequence
  synthetic peptide
TKKFSEW

SEQ ID NO: 1039 - protein, 7 aa, Artificial sequence
  synthetic peptide
KKFSEWG

SEQ ID NO: 1040 - protein, 7 aa, Artificial sequence
  synthetic peptide
KFSEWGN

SEQ ID NO: 1041 - protein, 7 aa, Artificial sequence
  synthetic peptide
FSEWGNN

SEQ ID NO: 1042 - protein, 7 aa, Artificial sequence
  synthetic peptide
SEWGNNA

SEQ ID NO: 1043 - protein, 7 aa, Artificial sequence
  synthetic peptide
EWGNNAF

SEQ ID NO: 1044 - protein, 7 aa, Artificial sequence
  synthetic peptide
WGNNAFF

SEQ ID NO: 1045 - protein, 7 aa, Artificial sequence
  synthetic peptide
GNNAFFY

SEQ ID NO: 1046 - protein, 7 aa, Artificial sequence
  synthetic peptide
NNAFFYY

SEQ ID NO: 1047 - protein, 7 aa, Artificial sequence
  synthetic peptide
NAFFYYF

SEQ ID NO: 1048 - protein, 7 aa, Artificial sequence
  synthetic peptide
AFFYYFE

SEQ ID NO: 1049 - protein, 7 aa, Artificial sequence
  synthetic peptide
FFYYFEH

SEQ ID NO: 1050 - protein, 7 aa, Artificial sequence
  synthetic peptide
FYYFEHR

SEQ ID NO: 1051 - protein, 7 aa, Artificial sequence
  synthetic peptide
YYFEHRS

SEQ ID NO: 1052 - protein, 7 aa, Artificial sequence
  synthetic peptide
YFEHRSS

SEQ ID NO: 1053 - protein, 7 aa, Artificial sequence
  synthetic peptide
FEHRSSK

SEQ ID NO: 1054 - protein, 7 aa, Artificial sequence
  synthetic peptide
EHRSSKL

SEQ ID NO: 1055 - protein, 7 aa, Artificial sequence
  synthetic peptide
HRSSKLP

SEQ ID NO: 1056 - protein, 7 aa, Artificial sequence
  synthetic peptide
RSSKLPW

SEQ ID NO: 1057 - protein, 7 aa, Artificial sequence
  synthetic peptide
SSKLPWP

SEQ ID NO: 1058 - protein, 7 aa, Artificial sequence
  synthetic peptide
SKLPWPE

SEQ ID NO: 1059 - protein, 7 aa, Artificial sequence
  synthetic peptide
KLPWPEW

SEQ ID NO: 1060 - protein, 7 aa, Artificial sequence
  synthetic peptide
LPWPEWM

SEQ ID NO: 1061 - protein, 7 aa, Artificial sequence
  synthetic peptide
PWPEWMG

SEQ ID NO: 1062 - protein, 7 aa, Artificial sequence
  synthetic peptide
WPEWMGV

SEQ ID NO: 1063 - protein, 7 aa, Artificial sequence
  synthetic peptide
PEWMGVM

SEQ ID NO: 1064 - protein, 7 aa, Artificial sequence
  synthetic peptide
EWMGVMH

SEQ ID NO: 1065 - protein, 7 aa, Artificial sequence
  synthetic peptide
WMGVMHG

SEQ ID NO: 1066 - protein, 7 aa, Artificial sequence
  synthetic peptide
MGVMHGY

SEQ ID NO: 1067 - protein, 7 aa, Artificial sequence
  synthetic peptide
GVMHGYE

SEQ ID NO: 1068 - protein, 7 aa, Artificial sequence
  synthetic peptide
VMHGYEI

SEQ ID NO: 1069 - protein, 7 aa, Artificial sequence
  synthetic peptide
MHGYEIE

SEQ ID NO: 1070 - protein, 7 aa, Artificial sequence
  synthetic peptide
HGYEIEF

SEQ ID NO: 1071 - protein, 7 aa, Artificial sequence
  synthetic peptide
GYEIEFV

SEQ ID NO: 1072 - protein, 7 aa, Artificial sequence
  synthetic peptide
YEIEFVF

SEQ ID NO: 1073 - protein, 7 aa, Artificial sequence
  synthetic peptide
EIEFVFG

SEQ ID NO: 1074 - protein, 7 aa, Artificial sequence
  synthetic peptide
IEFVFGL

SEQ ID NO: 1075 - protein, 7 aa, Artificial sequence
  synthetic peptide
EFVFGLP

SEQ ID NO: 1076 - protein, 7 aa, Artificial sequence
  synthetic peptide
FVFGLPL

SEQ ID NO: 1077 - protein, 7 aa, Artificial sequence
  synthetic peptide
VFGLPLE

SEQ ID NO: 1078 - protein, 7 aa, Artificial sequence
  synthetic peptide
FGLPLER

SEQ ID NO: 1079 - protein, 7 aa, Artificial sequence
  synthetic peptide
GLPLERR

SEQ ID NO: 1080 - protein, 7 aa, Artificial sequence
  synthetic peptide
LPLERRD

SEQ ID NO: 1081 - protein, 7 aa, Artificial sequence
  synthetic peptide
PLERRDN

SEQ ID NO: 1082 - protein, 7 aa, Artificial sequence
  synthetic peptide
LERRDNY

SEQ ID NO: 1083 - protein, 7 aa, Artificial sequence
  synthetic peptide
ERRDNYT

SEQ ID NO: 1084 - protein, 7 aa, Artificial sequence
  synthetic peptide
RRDNYTK

SEQ ID NO: 1085 - protein, 7 aa, Artificial sequence
  synthetic peptide
RDNYTKA

SEQ ID NO: 1086 - protein, 7 aa, Artificial sequence
  synthetic peptide
DNYTKAE

SEQ ID NO: 1087 - protein, 7 aa, Artificial sequence
  synthetic peptide
NYTKAEE

SEQ ID NO: 1088 - protein, 7 aa, Artificial sequence
  synthetic peptide
YTKAEEI

SEQ ID NO: 1089 - protein, 7 aa, Artificial sequence
  synthetic peptide
TKAEEIL

SEQ ID NO: 1090 - protein, 7 aa, Artificial sequence
  synthetic peptide
KAEEILS

SEQ ID NO: 1091 - protein, 7 aa, Artificial sequence
  synthetic peptide
AEEILSR

SEQ ID NO: 1092 - protein, 7 aa, Artificial sequence
  synthetic peptide
EEILSRS

SEQ ID NO: 1093 - protein, 7 aa, Artificial sequence
  synthetic peptide
EILSRSI

SEQ ID NO: 1094 - protein, 7 aa, Artificial sequence
  synthetic peptide
ILSRSIV

SEQ ID NO: 1095 - protein, 7 aa, Artificial sequence
  synthetic peptide
LSRSIVK

SEQ ID NO: 1096 - protein, 7 aa, Artificial sequence
  synthetic peptide
SRSIVKR

SEQ ID NO: 1097 - protein, 7 aa, Artificial sequence
  synthetic peptide
RSIVKRW

SEQ ID NO: 1098 - protein, 7 aa, Artificial sequence
  synthetic peptide
SIVKRWA

SEQ ID NO: 1099 - protein, 7 aa, Artificial sequence
  synthetic peptide
IVKRWAN

SEQ ID NO: 1100 - protein, 7 aa, Artificial sequence
  synthetic peptide
VKRWANF

SEQ ID NO: 1101 - protein, 7 aa, Artificial sequence
  synthetic peptide
KRWANFA

SEQ ID NO: 1102 - protein, 7 aa, Artificial sequence
  synthetic peptide
RWANFAK

SEQ ID NO: 1103 - protein, 7 aa, Artificial sequence
  synthetic peptide
WANFAKY

SEQ ID NO: 1104 - protein, 7 aa, Artificial sequence
  synthetic peptide
ANFAKYG

SEQ ID NO: 1105 - protein, 7 aa, Artificial sequence
  synthetic peptide
NFAKYGN

SEQ ID NO: 1106 - protein, 7 aa, Artificial sequence
  synthetic peptide
FAKYGNP

SEQ ID NO: 1107 - protein, 7 aa, Artificial sequence
  synthetic peptide
AKYGNPN

SEQ ID NO: 1108 - protein, 7 aa, Artificial sequence
  synthetic peptide
KYGNPNE

SEQ ID NO: 1109 - protein, 7 aa, Artificial sequence
  synthetic peptide
YGNPNET

SEQ ID NO: 1110 - protein, 7 aa, Artificial sequence
  synthetic peptide
GNPNETQ

SEQ ID NO: 1111 - protein, 7 aa, Artificial sequence
  synthetic peptide
NPNETQN

SEQ ID NO: 1112 - protein, 7 aa, Artificial sequence
  synthetic peptide
PNETQNN

SEQ ID NO: 1113 - protein, 7 aa, Artificial sequence
  synthetic peptide
NETQNNS

SEQ ID NO: 1114 - protein, 7 aa, Artificial sequence
  synthetic peptide
ETQNNST

SEQ ID NO: 1115 - protein, 7 aa, Artificial sequence
  synthetic peptide
TQNNSTS

SEQ ID NO: 1116 - protein, 7 aa, Artificial sequence
  synthetic peptide
QNNSTSW

SEQ ID NO: 1117 - protein, 7 aa, Artificial sequence
  synthetic peptide
NNSTSWP

SEQ ID NO: 1118 - protein, 7 aa, Artificial sequence
  synthetic peptide
NSTSWPV

SEQ ID NO: 1119 - protein, 7 aa, Artificial sequence
  synthetic peptide
STSWPVF

SEQ ID NO: 1120 - protein, 7 aa, Artificial sequence
  synthetic peptide
TSWPVFK

SEQ ID NO: 1121 - protein, 7 aa, Artificial sequence
  synthetic peptide
SWPVFKS

SEQ ID NO: 1122 - protein, 7 aa, Artificial sequence
  synthetic peptide
WPVFKST

SEQ ID NO: 1123 - protein, 7 aa, Artificial sequence
  synthetic peptide
PVFKSTE

SEQ ID NO: 1124 - protein, 7 aa, Artificial sequence
  synthetic peptide
VFKSTEQ

SEQ ID NO: 1125 - protein, 7 aa, Artificial sequence
  synthetic peptide
FKSTEQK

SEQ ID NO: 1126 - protein, 7 aa, Artificial sequence
  synthetic peptide
KSTEQKY

SEQ ID NO: 1127 - protein, 7 aa, Artificial sequence
  synthetic peptide
STEQKYL

SEQ ID NO: 1128 - protein, 7 aa, Artificial sequence
  synthetic peptide
TEQKYLT

SEQ ID NO: 1129 - protein, 7 aa, Artificial sequence
  synthetic peptide
EQKYLTL

SEQ ID NO: 1130 - protein, 7 aa, Artificial sequence
  synthetic peptide
QKYLTLN

SEQ ID NO: 1131 - protein, 7 aa, Artificial sequence
  synthetic peptide
KYLTLNT

SEQ ID NO: 1132 - protein, 7 aa, Artificial sequence
  synthetic peptide
YLTLNTE

SEQ ID NO: 1133 - protein, 7 aa, Artificial sequence
  synthetic peptide
LTLNTES

SEQ ID NO: 1134 - protein, 7 aa, Artificial sequence
  synthetic peptide
TLNTEST

SEQ ID NO: 1135 - protein, 7 aa, Artificial sequence
  synthetic peptide
LNTESTR

SEQ ID NO: 1136 - protein, 7 aa, Artificial sequence
  synthetic peptide
NTESTRI

SEQ ID NO: 1137 - protein, 7 aa, Artificial sequence
  synthetic peptide
TESTRIM

SEQ ID NO: 1138 - protein, 7 aa, Artificial sequence
  synthetic peptide
ESTRIMT

SEQ ID NO: 1139 - protein, 7 aa, Artificial sequence
  synthetic peptide
STRIMTK

SEQ ID NO: 1140 - protein, 7 aa, Artificial sequence
  synthetic peptide
TRIMTKL

SEQ ID NO: 1141 - protein, 7 aa, Artificial sequence
  synthetic peptide
RIMTKLR

SEQ ID NO: 1142 - protein, 7 aa, Artificial sequence
  synthetic peptide
IMTKLRA

SEQ ID NO: 1143 - protein, 7 aa, Artificial sequence
  synthetic peptide
MTKLRAQ

SEQ ID NO: 1144 - protein, 7 aa, Artificial sequence
  synthetic peptide
TKLRAQQ

SEQ ID NO: 1145 - protein, 7 aa, Artificial sequence
  synthetic peptide
KLRAQQC

SEQ ID NO: 1146 - protein, 7 aa, Artificial sequence
  synthetic peptide
LRAQQCR

SEQ ID NO: 1147 - protein, 7 aa, Artificial sequence
  synthetic peptide
RAQQCRF

SEQ ID NO: 1148 - protein, 7 aa, Artificial sequence
  synthetic peptide
AQQCRFW

SEQ ID NO: 1149 - protein, 7 aa, Artificial sequence
  synthetic peptide
QQCRFWT

SEQ ID NO: 1150 - protein, 7 aa, Artificial sequence
  synthetic peptide
QCRFWTS

SEQ ID NO: 1151 - protein, 7 aa, Artificial sequence
  synthetic peptide
CRFWTSF

SEQ ID NO: 1152 - protein, 7 aa, Artificial sequence
  synthetic peptide
RFWTSFF

SEQ ID NO: 1153 - protein, 7 aa, Artificial sequence
  synthetic peptide
FWTSFFP

SEQ ID NO: 1154 - protein, 7 aa, Artificial sequence
  synthetic peptide
WTSFFPK

SEQ ID NO: 1155 - protein, 7 aa, Artificial sequence
  synthetic peptide
TSFFPKV

SEQ ID NO: 1156 - protein, 7 aa, Artificial sequence
  synthetic peptide
SFFPKVL

SEQ ID NO: 1157 - protein, 7 aa, Artificial sequence
  synthetic peptide
FFPKVLE

SEQ ID NO: 1158 - protein, 7 aa, Artificial sequence
  synthetic peptide
FPKVLEM

SEQ ID NO: 1159 - protein, 7 aa, Artificial sequence
  synthetic peptide
PKVLEMT

SEQ ID NO: 1160 - protein, 7 aa, Artificial sequence
  synthetic peptide
KVLEMTG

SEQ ID NO: 1161 - protein, 7 aa, Artificial sequence
  synthetic peptide
VLEMTGN

SEQ ID NO: 1162 - protein, 7 aa, Artificial sequence
  synthetic peptide
LEMTGNI

SEQ ID NO: 1163 - protein, 7 aa, Artificial sequence
  synthetic peptide
EMTGNID

SEQ ID NO: 1164 - protein, 7 aa, Artificial sequence
  synthetic peptide
MTGNIDE

SEQ ID NO: 1165 - protein, 7 aa, Artificial sequence
  synthetic peptide
TGNIDEA

SEQ ID NO: 1166 - protein, 7 aa, Artificial sequence
  synthetic peptide
GNIDEAE

SEQ ID NO: 1167 - protein, 7 aa, Artificial sequence
  synthetic peptide
NIDEAEW

SEQ ID NO: 1168 - protein, 7 aa, Artificial sequence
  synthetic peptide
IDEAEWE

SEQ ID NO: 1169 - protein, 7 aa, Artificial sequence
  synthetic peptide
DEAEWEW

SEQ ID NO: 1170 - protein, 7 aa, Artificial sequence
  synthetic peptide
EAEWEWK

SEQ ID NO: 1171 - protein, 7 aa, Artificial sequence
  synthetic peptide
AEWEWKA

SEQ ID NO: 1172 - protein, 7 aa, Artificial sequence
  synthetic peptide
EWEWKAG

SEQ ID NO: 1173 - protein, 7 aa, Artificial sequence
  synthetic peptide
WEWKAGF

SEQ ID NO: 1174 - protein, 7 aa, Artificial sequence
  synthetic peptide
EWKAGFH

SEQ ID NO: 1175 - protein, 7 aa, Artificial sequence
  synthetic peptide
WKAGFHR

SEQ ID NO: 1176 - protein, 7 aa, Artificial sequence
  synthetic peptide
KAGFHRW

SEQ ID NO: 1177 - protein, 7 aa, Artificial sequence
  synthetic peptide
AGFHRWN

SEQ ID NO: 1178 - protein, 7 aa, Artificial sequence
  synthetic peptide
GFHRWNN

SEQ ID NO: 1179 - protein, 7 aa, Artificial sequence
  synthetic peptide
FHRWNNY

SEQ ID NO: 1180 - protein, 7 aa, Artificial sequence
  synthetic peptide
HRWNNYM

SEQ ID NO: 1181 - protein, 7 aa, Artificial sequence
  synthetic peptide
RWNNYMM

SEQ ID NO: 1182 - protein, 7 aa, Artificial sequence
  synthetic peptide
WNNYMMD

SEQ ID NO: 1183 - protein, 7 aa, Artificial sequence
  synthetic peptide
NNYMMDW

SEQ ID NO: 1184 - protein, 7 aa, Artificial sequence
  synthetic peptide
NYMMDWK

SEQ ID NO: 1185 - protein, 7 aa, Artificial sequence
  synthetic peptide
YMMDWKN

SEQ ID NO: 1186 - protein, 7 aa, Artificial sequence
  synthetic peptide
MMDWKNQ

SEQ ID NO: 1187 - protein, 7 aa, Artificial sequence
  synthetic peptide
MDWKNQF

SEQ ID NO: 1188 - protein, 7 aa, Artificial sequence
  synthetic peptide
DWKNQFN

SEQ ID NO: 1189 - protein, 7 aa, Artificial sequence
  synthetic peptide
WKNQFND

SEQ ID NO: 1190 - protein, 7 aa, Artificial sequence
  synthetic peptide
KNQFNDY

SEQ ID NO: 1191 - protein, 7 aa, Artificial sequence
  synthetic peptide
NQFNDYT

SEQ ID NO: 1192 - protein, 7 aa, Artificial sequence
  synthetic peptide
QFNDYTS

SEQ ID NO: 1193 - protein, 7 aa, Artificial sequence
  synthetic peptide
FNDYTSK

SEQ ID NO: 1194 - protein, 7 aa, Artificial sequence
  synthetic peptide
NDYTSKK

SEQ ID NO: 1195 - protein, 7 aa, Artificial sequence
  synthetic peptide
DYTSKKE

SEQ ID NO: 1196 - protein, 7 aa, Artificial sequence
  synthetic peptide
YTSKKES

SEQ ID NO: 1197 - protein, 7 aa, Artificial sequence
  synthetic peptide
TSKKESC

SEQ ID NO: 1198 - protein, 7 aa, Artificial sequence
  synthetic peptide
SKKESCV

SEQ ID NO: 1199 - protein, 7 aa, Artificial sequence
  synthetic peptide
KKESCVG

SEQ ID NO: 1200 - protein, 7 aa, Artificial sequence
  synthetic peptide
KESCVGL

SEQ ID NO: 1201 - protein, 8 aa, Artificial sequence
  synthetic peptide
MHSKVTII

SEQ ID NO: 1202 - protein, 8 aa, Artificial sequence
  synthetic peptide
HSKVTIIC

SEQ ID NO: 1203 - protein, 8 aa, Artificial sequence
  synthetic peptide
SKVTIICI

SEQ ID NO: 1204 - protein, 8 aa, Artificial sequence
  synthetic peptide
KVTIICIR

SEQ ID NO: 1205 - protein, 8 aa, Artificial sequence
  synthetic peptide
VTIICIRF

SEQ ID NO: 1206 - protein, 8 aa, Artificial sequence
  synthetic peptide
TIICIRFL

SEQ ID NO: 1207 - protein, 8 aa, Artificial sequence
  synthetic peptide
IICIRFLF

SEQ ID NO: 1208 - protein, 8 aa, Artificial sequence
  synthetic peptide
ICIRFLFW

SEQ ID NO: 1209 - protein, 8 aa, Artificial sequence
  synthetic peptide
CIRFLFWF

SEQ ID NO: 1210 - protein, 8 aa, Artificial sequence
  synthetic peptide
IRFLFWFL

SEQ ID NO: 1211 - protein, 8 aa, Artificial sequence
  synthetic peptide
RFLFWFLL

SEQ ID NO: 1212 - protein, 8 aa, Artificial sequence
  synthetic peptide
FLFWFLLL

SEQ ID NO: 1213 - protein, 8 aa, Artificial sequence
  synthetic peptide
LFWFLLLC

SEQ ID NO: 1214 - protein, 8 aa, Artificial sequence
  synthetic peptide
FWFLLLCM

SEQ ID NO: 1215 - protein, 8 aa, Artificial sequence
  synthetic peptide
WFLLLCML

SEQ ID NO: 1216 - protein, 8 aa, Artificial sequence
  synthetic peptide
FLLLCMLI

SEQ ID NO: 1217 - protein, 8 aa, Artificial sequence
  synthetic peptide
LLLCMLIG

SEQ ID NO: 1218 - protein, 8 aa, Artificial sequence
  synthetic peptide
LLCMLIGK

SEQ ID NO: 1219 - protein, 8 aa, Artificial sequence
  synthetic peptide
LCMLIGKS

SEQ ID NO: 1220 - protein, 8 aa, Artificial sequence
  synthetic peptide
CMLIGKSH

SEQ ID NO: 1221 - protein, 8 aa, Artificial sequence
  synthetic peptide
MLIGKSHT

SEQ ID NO: 1222 - protein, 8 aa, Artificial sequence
  synthetic peptide
LIGKSHTE

SEQ ID NO: 1223 - protein, 8 aa, Artificial sequence
  synthetic peptide
IGKSHTED

SEQ ID NO: 1224 - protein, 8 aa, Artificial sequence
  synthetic peptide
GKSHTEDD

SEQ ID NO: 1225 - protein, 8 aa, Artificial sequence
  synthetic peptide
KSHTEDDI

SEQ ID NO: 1226 - protein, 8 aa, Artificial sequence
  synthetic peptide
SHTEDDII

SEQ ID NO: 1227 - protein, 8 aa, Artificial sequence
  synthetic peptide
HTEDDIII

SEQ ID NO: 1228 - protein, 8 aa, Artificial sequence
  synthetic peptide
TEDDIIIA

SEQ ID NO: 1229 - protein, 8 aa, Artificial sequence
  synthetic peptide
EDDIIIAT

SEQ ID NO: 1230 - protein, 8 aa, Artificial sequence
  synthetic peptide
DDIIIATK

SEQ ID NO: 1231 - protein, 8 aa, Artificial sequence
  synthetic peptide
DIIIATKN

SEQ ID NO: 1232 - protein, 8 aa, Artificial sequence
  synthetic peptide
IIIATKNG

SEQ ID NO: 1233 - protein, 8 aa, Artificial sequence
  synthetic peptide
IIATKNGK

SEQ ID NO: 1234 - protein, 8 aa, Artificial sequence
  synthetic peptide
IATKNGKV

SEQ ID NO: 1235 - protein, 8 aa, Artificial sequence
  synthetic peptide
ATKNGKVR

SEQ ID NO: 1236 - protein, 8 aa, Artificial sequence
  synthetic peptide
TKNGKVRG

SEQ ID NO: 1237 - protein, 8 aa, Artificial sequence
  synthetic peptide
KNGKVRGM

SEQ ID NO: 1238 - protein, 8 aa, Artificial sequence
  synthetic peptide
NGKVRGMN

SEQ ID NO: 1239 - protein, 8 aa, Artificial sequence
  synthetic peptide
GKVRGMNL

SEQ ID NO: 1240 - protein, 8 aa, Artificial sequence
  synthetic peptide
KVRGMNLT

SEQ ID NO: 1241 - protein, 8 aa, Artificial sequence
  synthetic peptide
VRGMNLTV

SEQ ID NO: 1242 - protein, 8 aa, Artificial sequence
  synthetic peptide
RGMNLTVF

SEQ ID NO: 1243 - protein, 8 aa, Artificial sequence
  synthetic peptide
GMNLTVFG

SEQ ID NO: 1244 - protein, 8 aa, Artificial sequence
  synthetic peptide
MNLTVFGG

SEQ ID NO: 1245 - protein, 8 aa, Artificial sequence
  synthetic peptide
NLTVFGGT

SEQ ID NO: 1246 - protein, 8 aa, Artificial sequence
  synthetic peptide
LTVFGGTV

SEQ ID NO: 1247 - protein, 8 aa, Artificial sequence
  synthetic peptide
TVFGGTVT

SEQ ID NO: 1248 - protein, 8 aa, Artificial sequence
  synthetic peptide
VFGGTVTA

SEQ ID NO: 1249 - protein, 8 aa, Artificial sequence
  synthetic peptide
FGGTVTAF

SEQ ID NO: 1250 - protein, 8 aa, Artificial sequence
  synthetic peptide
GGTVTAFL

SEQ ID NO: 1251 - protein, 8 aa, Artificial sequence
  synthetic peptide
GTVTAFLG

SEQ ID NO: 1252 - protein, 8 aa, Artificial sequence
  synthetic peptide
TVTAFLGI

SEQ ID NO: 1253 - protein, 8 aa, Artificial sequence
  synthetic peptide
VTAFLGIP

SEQ ID NO: 1254 - protein, 8 aa, Artificial sequence
  synthetic peptide
TAFLGIPY

SEQ ID NO: 1255 - protein, 8 aa, Artificial sequence
  synthetic peptide
AFLGIPYA

SEQ ID NO: 1256 - protein, 8 aa, Artificial sequence
  synthetic peptide
FLGIPYAQ

SEQ ID NO: 1257 - protein, 8 aa, Artificial sequence
  synthetic peptide
LGIPYAQP

SEQ ID NO: 1258 - protein, 8 aa, Artificial sequence
  synthetic peptide
GIPYAQPP

SEQ ID NO: 1259 - protein, 8 aa, Artificial sequence
  synthetic peptide
IPYAQPPL

SEQ ID NO: 1260 - protein, 8 aa, Artificial sequence
  synthetic peptide
PYAQPPLG

SEQ ID NO: 1261 - protein, 8 aa, Artificial sequence
  synthetic peptide
YAQPPLGR

SEQ ID NO: 1262 - protein, 8 aa, Artificial sequence
  synthetic peptide
AQPPLGRL

SEQ ID NO: 1263 - protein, 8 aa, Artificial sequence
  synthetic peptide
QPPLGRLR

SEQ ID NO: 1264 - protein, 8 aa, Artificial sequence
  synthetic peptide
PPLGRLRF

SEQ ID NO: 1265 - protein, 8 aa, Artificial sequence
  synthetic peptide
PLGRLRFK

SEQ ID NO: 1266 - protein, 8 aa, Artificial sequence
  synthetic peptide
LGRLRFKK

SEQ ID NO: 1267 - protein, 8 aa, Artificial sequence
  synthetic peptide
GRLRFKKP

SEQ ID NO: 1268 - protein, 8 aa, Artificial sequence
  synthetic peptide
RLRFKKPQ

SEQ ID NO: 1269 - protein, 8 aa, Artificial sequence
  synthetic peptide
LRFKKPQS

SEQ ID NO: 1270 - protein, 8 aa, Artificial sequence
  synthetic peptide
RFKKPQSL

SEQ ID NO: 1271 - protein, 8 aa, Artificial sequence
  synthetic peptide
FKKPQSLT

SEQ ID NO: 1272 - protein, 8 aa, Artificial sequence
  synthetic peptide
KKPQSLTK

SEQ ID NO: 1273 - protein, 8 aa, Artificial sequence
  synthetic peptide
KPQSLTKW

SEQ ID NO: 1274 - protein, 8 aa, Artificial sequence
  synthetic peptide
PQSLTKWS

SEQ ID NO: 1275 - protein, 8 aa, Artificial sequence
  synthetic peptide
QSLTKWSD

SEQ ID NO: 1276 - protein, 8 aa, Artificial sequence
  synthetic peptide
SLTKWSDI

SEQ ID NO: 1277 - protein, 8 aa, Artificial sequence
  synthetic peptide
LTKWSDIW

SEQ ID NO: 1278 - protein, 8 aa, Artificial sequence
  synthetic peptide
TKWSDIWN

SEQ ID NO: 1279 - protein, 8 aa, Artificial sequence
  synthetic peptide
KWSDIWNA

SEQ ID NO: 1280 - protein, 8 aa, Artificial sequence
  synthetic peptide
WSDIWNAT

SEQ ID NO: 1281 - protein, 8 aa, Artificial sequence
  synthetic peptide
SDIWNATK

SEQ ID NO: 1282 - protein, 8 aa, Artificial sequence
  synthetic peptide
DIWNATKY

SEQ ID NO: 1283 - protein, 8 aa, Artificial sequence
  synthetic peptide
IWNATKYA

SEQ ID NO: 1284 - protein, 8 aa, Artificial sequence
  synthetic peptide
WNATKYAN

SEQ ID NO: 1285 - protein, 8 aa, Artificial sequence
  synthetic peptide
NATKYANS

SEQ ID NO: 1286 - protein, 8 aa, Artificial sequence
  synthetic peptide
ATKYANSC

SEQ ID NO: 1287 - protein, 8 aa, Artificial sequence
  synthetic peptide
TKYANSCC

SEQ ID NO: 1288 - protein, 8 aa, Artificial sequence
  synthetic peptide
KYANSCCQ

SEQ ID NO: 1289 - protein, 8 aa, Artificial sequence
  synthetic peptide
YANSCCQN

SEQ ID NO: 1290 - protein, 8 aa, Artificial sequence
  synthetic peptide
ANSCCQNI

SEQ ID NO: 1291 - protein, 8 aa, Artificial sequence
  synthetic peptide
NSCCQNID

SEQ ID NO: 1292 - protein, 8 aa, Artificial sequence
  synthetic peptide
SCCQNIDQ

SEQ ID NO: 1293 - protein, 8 aa, Artificial sequence
  synthetic peptide
CCQNIDQS

SEQ ID NO: 1294 - protein, 8 aa, Artificial sequence
  synthetic peptide
CQNIDQSF

SEQ ID NO: 1295 - protein, 8 aa, Artificial sequence
  synthetic peptide
QNIDQSFP

SEQ ID NO: 1296 - protein, 8 aa, Artificial sequence
  synthetic peptide
NIDQSFPG

SEQ ID NO: 1297 - protein, 8 aa, Artificial sequence
  synthetic peptide
IDQSFPGF

SEQ ID NO: 1298 - protein, 8 aa, Artificial sequence
  synthetic peptide
DQSFPGFH

SEQ ID NO: 1299 - protein, 8 aa, Artificial sequence
  synthetic peptide
QSFPGFHG

SEQ ID NO: 1300 - protein, 8 aa, Artificial sequence
  synthetic peptide
SFPGFHGS

SEQ ID NO: 1301 - protein, 8 aa, Artificial sequence
  synthetic peptide
FPGFHGSE

SEQ ID NO: 1302 - protein, 8 aa, Artificial sequence
  synthetic peptide
PGFHGSEM

SEQ ID NO: 1303 - protein, 8 aa, Artificial sequence
  synthetic peptide
GFHGSEMW

SEQ ID NO: 1304 - protein, 8 aa, Artificial sequence
  synthetic peptide
FHGSEMWN

SEQ ID NO: 1305 - protein, 8 aa, Artificial sequence
  synthetic peptide
HGSEMWNP

SEQ ID NO: 1306 - protein, 8 aa, Artificial sequence
  synthetic peptide
GSEMWNPN

SEQ ID NO: 1307 - protein, 8 aa, Artificial sequence
  synthetic peptide
SEMWNPNT

SEQ ID NO: 1308 - protein, 8 aa, Artificial sequence
  synthetic peptide
EMWNPNTD

SEQ ID NO: 1309 - protein, 8 aa, Artificial sequence
  synthetic peptide
MWNPNTDL

SEQ ID NO: 1310 - protein, 8 aa, Artificial sequence
  synthetic peptide
WNPNTDLS

SEQ ID NO: 1311 - protein, 8 aa, Artificial sequence
  synthetic peptide
NPNTDLSE

SEQ ID NO: 1312 - protein, 8 aa, Artificial sequence
  synthetic peptide
PNTDLSED

SEQ ID NO: 1313 - protein, 8 aa, Artificial sequence
  synthetic peptide
NTDLSEDC

SEQ ID NO: 1314 - protein, 8 aa, Artificial sequence
  synthetic peptide
TDLSEDCL

SEQ ID NO: 1315 - protein, 8 aa, Artificial sequence
  synthetic peptide
DLSEDCLY

SEQ ID NO: 1316 - protein, 8 aa, Artificial sequence
  synthetic peptide
LSEDCLYL

SEQ ID NO: 1317 - protein, 8 aa, Artificial sequence
  synthetic peptide
SEDCLYLN

SEQ ID NO: 1318 - protein, 8 aa, Artificial sequence
  synthetic peptide
EDCLYLNV

SEQ ID NO: 1319 - protein, 8 aa, Artificial sequence
  synthetic peptide
DCLYLNVW

SEQ ID NO: 1320 - protein, 8 aa, Artificial sequence
  synthetic peptide
CLYLNVWI

SEQ ID NO: 1321 - protein, 8 aa, Artificial sequence
  synthetic peptide
LYLNVWIP

SEQ ID NO: 1322 - protein, 8 aa, Artificial sequence
  synthetic peptide
YLNVWIPA

SEQ ID NO: 1323 - protein, 8 aa, Artificial sequence
  synthetic peptide
LNVWIPAP

SEQ ID NO: 1324 - protein, 8 aa, Artificial sequence
  synthetic peptide
NVWIPAPK

SEQ ID NO: 1325 - protein, 8 aa, Artificial sequence
  synthetic peptide
VWIPAPKP

SEQ ID NO: 1326 - protein, 8 aa, Artificial sequence
  synthetic peptide
WIPAPKPK

SEQ ID NO: 1327 - protein, 8 aa, Artificial sequence
  synthetic peptide
IPAPKPKN

SEQ ID NO: 1328 - protein, 8 aa, Artificial sequence
  synthetic peptide
PAPKPKNA

SEQ ID NO: 1329 - protein, 8 aa, Artificial sequence
  synthetic peptide
APKPKNAT

SEQ ID NO: 1330 - protein, 8 aa, Artificial sequence
  synthetic peptide
PKPKNATV

SEQ ID NO: 1331 - protein, 8 aa, Artificial sequence
  synthetic peptide
KPKNATVL

SEQ ID NO: 1332 - protein, 8 aa, Artificial sequence
  synthetic peptide
PKNATVLI

SEQ ID NO: 1333 - protein, 8 aa, Artificial sequence
  synthetic peptide
KNATVLIW

SEQ ID NO: 1334 - protein, 8 aa, Artificial sequence
  synthetic peptide
NATVLIWI

SEQ ID NO: 1335 - protein, 8 aa, Artificial sequence
  synthetic peptide
ATVLIWIY

SEQ ID NO: 1336 - protein, 8 aa, Artificial sequence
  synthetic peptide
TVLIWIYG

SEQ ID NO: 1337 - protein, 8 aa, Artificial sequence
  synthetic peptide
VLIWIYGG

SEQ ID NO: 1338 - protein, 8 aa, Artificial sequence
  synthetic peptide
LIWIYGGG

SEQ ID NO: 1339 - protein, 8 aa, Artificial sequence
  synthetic peptide
IWIYGGGF

SEQ ID NO: 1340 - protein, 8 aa, Artificial sequence
  synthetic peptide
WIYGGGFQ

SEQ ID NO: 1341 - protein, 8 aa, Artificial sequence
  synthetic peptide
IYGGGFQT

SEQ ID NO: 1342 - protein, 8 aa, Artificial sequence
  synthetic peptide
YGGGFQTG

SEQ ID NO: 1343 - protein, 8 aa, Artificial sequence
  synthetic peptide
GGGFQTGT

SEQ ID NO: 1344 - protein, 8 aa, Artificial sequence
  synthetic peptide
GGFQTGTS

SEQ ID NO: 1345 - protein, 8 aa, Artificial sequence
  synthetic peptide
GFQTGTSS

SEQ ID NO: 1346 - protein, 8 aa, Artificial sequence
  synthetic peptide
FQTGTSSL

SEQ ID NO: 1347 - protein, 8 aa, Artificial sequence
  synthetic peptide
QTGTSSLH

SEQ ID NO: 1348 - protein, 8 aa, Artificial sequence
  synthetic peptide
TGTSSLHV

SEQ ID NO: 1349 - protein, 8 aa, Artificial sequence
  synthetic peptide
GTSSLHVY

SEQ ID NO: 1350 - protein, 8 aa, Artificial sequence
  synthetic peptide
TSSLHVYD

SEQ ID NO: 1351 - protein, 8 aa, Artificial sequence
  synthetic peptide
SSLHVYDG

SEQ ID NO: 1352 - protein, 8 aa, Artificial sequence
  synthetic peptide
SLHVYDGK

SEQ ID NO: 1353 - protein, 8 aa, Artificial sequence
  synthetic peptide
LHVYDGKF

SEQ ID NO: 1354 - protein, 8 aa, Artificial sequence
  synthetic peptide
HVYDGKFL

SEQ ID NO: 1355 - protein, 8 aa, Artificial sequence
  synthetic peptide
VYDGKFLA

SEQ ID NO: 1356 - protein, 8 aa, Artificial sequence
  synthetic peptide
YDGKFLAR

SEQ ID NO: 1357 - protein, 8 aa, Artificial sequence
  synthetic peptide
DGKFLARV

SEQ ID NO: 1358 - protein, 8 aa, Artificial sequence
  synthetic peptide
GKFLARVE

SEQ ID NO: 1359 - protein, 8 aa, Artificial sequence
  synthetic peptide
KFLARVER

SEQ ID NO: 1360 - protein, 8 aa, Artificial sequence
  synthetic peptide
FLARVERV

SEQ ID NO: 1361 - protein, 8 aa, Artificial sequence
  synthetic peptide
LARVERVI

SEQ ID NO: 1362 - protein, 8 aa, Artificial sequence
  synthetic peptide
ARVERVIV

SEQ ID NO: 1363 - protein, 8 aa, Artificial sequence
  synthetic peptide
RVERVIVV

SEQ ID NO: 1364 - protein, 8 aa, Artificial sequence
  synthetic peptide
VERVIVVS

SEQ ID NO: 1365 - protein, 8 aa, Artificial sequence
  synthetic peptide
ERVIVVSM

SEQ ID NO: 1366 - protein, 8 aa, Artificial sequence
  synthetic peptide
RVIVVSMN

SEQ ID NO: 1367 - protein, 8 aa, Artificial sequence
  synthetic peptide
VIVVSMNY

SEQ ID NO: 1368 - protein, 8 aa, Artificial sequence
  synthetic peptide
IVVSMNYR

SEQ ID NO: 1369 - protein, 8 aa, Artificial sequence
  synthetic peptide
VVSMNYRV

SEQ ID NO: 1370 - protein, 8 aa, Artificial sequence
  synthetic peptide
VSMNYRVG

SEQ ID NO: 1371 - protein, 8 aa, Artificial sequence
  synthetic peptide
SMNYRVGA

SEQ ID NO: 1372 - protein, 8 aa, Artificial sequence
  synthetic peptide
MNYRVGAL

SEQ ID NO: 1373 - protein, 8 aa, Artificial sequence
  synthetic peptide
NYRVGALG

SEQ ID NO: 1374 - protein, 8 aa, Artificial sequence
  synthetic peptide
YRVGALGF

SEQ ID NO: 1375 - protein, 8 aa, Artificial sequence
  synthetic peptide
RVGALGFL

SEQ ID NO: 1376 - protein, 8 aa, Artificial sequence
  synthetic peptide
VGALGFLA

SEQ ID NO: 1377 - protein, 8 aa, Artificial sequence
  synthetic peptide
GALGFLAL

SEQ ID NO: 1378 - protein, 8 aa, Artificial sequence
  synthetic peptide
ALGFLALP

SEQ ID NO: 1379 - protein, 8 aa, Artificial sequence
  synthetic peptide
LGFLALPG

SEQ ID NO: 1380 - protein, 8 aa, Artificial sequence
  synthetic peptide
GFLALPGN

SEQ ID NO: 1381 - protein, 8 aa, Artificial sequence
  synthetic peptide
FLALPGNP

SEQ ID NO: 1382 - protein, 8 aa, Artificial sequence
  synthetic peptide
LALPGNPE

SEQ ID NO: 1383 - protein, 8 aa, Artificial sequence
  synthetic peptide
ALPGNPEA

SEQ ID NO: 1384 - protein, 8 aa, Artificial sequence
  synthetic peptide
LPGNPEAP

SEQ ID NO: 1385 - protein, 8 aa, Artificial sequence
  synthetic peptide
PGNPEAPG

SEQ ID NO: 1386 - protein, 8 aa, Artificial sequence
  synthetic peptide
GNPEAPGN

SEQ ID NO: 1387 - protein, 8 aa, Artificial sequence
  synthetic peptide
NPEAPGNM

SEQ ID NO: 1388 - protein, 8 aa, Artificial sequence
  synthetic peptide
PEAPGNMG

SEQ ID NO: 1389 - protein, 8 aa, Artificial sequence
  synthetic peptide
EAPGNMGL

SEQ ID NO: 1390 - protein, 8 aa, Artificial sequence
  synthetic peptide
APGNMGLF

SEQ ID NO: 1391 - protein, 8 aa, Artificial sequence
  synthetic peptide
PGNMGLFD

SEQ ID NO: 1392 - protein, 8 aa, Artificial sequence
  synthetic peptide
GNMGLFDQ

SEQ ID NO: 1393 - protein, 8 aa, Artificial sequence
  synthetic peptide
NMGLFDQQ

SEQ ID NO: 1394 - protein, 8 aa, Artificial sequence
  synthetic peptide
MGLFDQQL

SEQ ID NO: 1395 - protein, 8 aa, Artificial sequence
  synthetic peptide
GLFDQQLA

SEQ ID NO: 1396 - protein, 8 aa, Artificial sequence
  synthetic peptide
LFDQQLAL

SEQ ID NO: 1397 - protein, 8 aa, Artificial sequence
  synthetic peptide
FDQQLALQ

SEQ ID NO: 1398 - protein, 8 aa, Artificial sequence
  synthetic peptide
DQQLALQW

SEQ ID NO: 1399 - protein, 8 aa, Artificial sequence
  synthetic peptide
QQLALQWV

SEQ ID NO: 1400 - protein, 8 aa, Artificial sequence
  synthetic peptide
QLALQWVQ

SEQ ID NO: 1401 - protein, 8 aa, Artificial sequence
  synthetic peptide
LALQWVQK

SEQ ID NO: 1402 - protein, 8 aa, Artificial sequence
  synthetic peptide
ALQWVQKN

SEQ ID NO: 1403 - protein, 8 aa, Artificial sequence
  synthetic peptide
LQWVQKNI

SEQ ID NO: 1404 - protein, 8 aa, Artificial sequence
  synthetic peptide
QWVQKNIA

SEQ ID NO: 1405 - protein, 8 aa, Artificial sequence
  synthetic peptide
WVQKNIAA

SEQ ID NO: 1406 - protein, 8 aa, Artificial sequence
  synthetic peptide
VQKNIAAF

SEQ ID NO: 1407 - protein, 8 aa, Artificial sequence
  synthetic peptide
QKNIAAFG

SEQ ID NO: 1408 - protein, 8 aa, Artificial sequence
  synthetic peptide
KNIAAFGG

SEQ ID NO: 1409 - protein, 8 aa, Artificial sequence
  synthetic peptide
NIAAFGGN

SEQ ID NO: 1410 - protein, 8 aa, Artificial sequence
  synthetic peptide
IAAFGGNP

SEQ ID NO: 1411 - protein, 8 aa, Artificial sequence
  synthetic peptide
AAFGGNPK

SEQ ID NO: 1412 - protein, 8 aa, Artificial sequence
  synthetic peptide
AFGGNPKS

SEQ ID NO: 1413 - protein, 8 aa, Artificial sequence
  synthetic peptide
FGGNPKSV

SEQ ID NO: 1414 - protein, 8 aa, Artificial sequence
  synthetic peptide
GGNPKSVT

SEQ ID NO: 1415 - protein, 8 aa, Artificial sequence
  synthetic peptide
GNPKSVTL

SEQ ID NO: 1416 - protein, 8 aa, Artificial sequence
  synthetic peptide
NPKSVTLF

SEQ ID NO: 1417 - protein, 8 aa, Artificial sequence
  synthetic peptide
PKSVTLFG

SEQ ID NO: 1418 - protein, 8 aa, Artificial sequence
  synthetic peptide
KSVTLFGE

SEQ ID NO: 1419 - protein, 8 aa, Artificial sequence
  synthetic peptide
SVTLFGES

SEQ ID NO: 1420 - protein, 8 aa, Artificial sequence
  synthetic peptide
VTLFGESA

SEQ ID NO: 1421 - protein, 8 aa, Artificial sequence
  synthetic peptide
TLFGESAG

SEQ ID NO: 1422 - protein, 8 aa, Artificial sequence
  synthetic peptide
LFGESAGA

SEQ ID NO: 1423 - protein, 8 aa, Artificial sequence
  synthetic peptide
FGESAGAA

SEQ ID NO: 1424 - protein, 8 aa, Artificial sequence
  synthetic peptide
GESAGAAS

SEQ ID NO: 1425 - protein, 8 aa, Artificial sequence
  synthetic peptide
ESAGAASV

SEQ ID NO: 1426 - protein, 8 aa, Artificial sequence
  synthetic peptide
SAGAASVS

SEQ ID NO: 1427 - protein, 8 aa, Artificial sequence
  synthetic peptide
AGAASVSL

SEQ ID NO: 1428 - protein, 8 aa, Artificial sequence
  synthetic peptide
GAASVSLH

SEQ ID NO: 1429 - protein, 8 aa, Artificial sequence
  synthetic peptide
AASVSLHL

SEQ ID NO: 1430 - protein, 8 aa, Artificial sequence
  synthetic peptide
ASVSLHLL

SEQ ID NO: 1431 - protein, 8 aa, Artificial sequence
  synthetic peptide
SVSLHLLS

SEQ ID NO: 1432 - protein, 8 aa, Artificial sequence
  synthetic peptide
VSLHLLSP

SEQ ID NO: 1433 - protein, 8 aa, Artificial sequence
  synthetic peptide
SLHLLSPG

SEQ ID NO: 1434 - protein, 8 aa, Artificial sequence
  synthetic peptide
LHLLSPGS

SEQ ID NO: 1435 - protein, 8 aa, Artificial sequence
  synthetic peptide
HLLSPGSH

SEQ ID NO: 1436 - protein, 8 aa, Artificial sequence
  synthetic peptide
LLSPGSHS

SEQ ID NO: 1437 - protein, 8 aa, Artificial sequence
  synthetic peptide
LSPGSHSL

SEQ ID NO: 1438 - protein, 8 aa, Artificial sequence
  synthetic peptide
SPGSHSLF

SEQ ID NO: 1439 - protein, 8 aa, Artificial sequence
  synthetic peptide
PGSHSLFT

SEQ ID NO: 1440 - protein, 8 aa, Artificial sequence
  synthetic peptide
GSHSLFTR

SEQ ID NO: 1441 - protein, 8 aa, Artificial sequence
  synthetic peptide
SHSLFTRA

SEQ ID NO: 1442 - protein, 8 aa, Artificial sequence
  synthetic peptide
HSLFTRAI

SEQ ID NO: 1443 - protein, 8 aa, Artificial sequence
  synthetic peptide
SLFTRAIL

SEQ ID NO: 1444 - protein, 8 aa, Artificial sequence
  synthetic peptide
LFTRAILQ

SEQ ID NO: 1445 - protein, 8 aa, Artificial sequence
  synthetic peptide
FTRAILQS

SEQ ID NO: 1446 - protein, 8 aa, Artificial sequence
  synthetic peptide
TRAILQSG

SEQ ID NO: 1447 - protein, 8 aa, Artificial sequence
  synthetic peptide
RAILQSGS

SEQ ID NO: 1448 - protein, 8 aa, Artificial sequence
  synthetic peptide
AILQSGSF

SEQ ID NO: 1449 - protein, 8 aa, Artificial sequence
  synthetic peptide
ILQSGSFN

SEQ ID NO: 1450 - protein, 8 aa, Artificial sequence
  synthetic peptide
LQSGSFNA

SEQ ID NO: 1451 - protein, 8 aa, Artificial sequence
  synthetic peptide
QSGSFNAP

SEQ ID NO: 1452 - protein, 8 aa, Artificial sequence
  synthetic peptide
SGSFNAPW

SEQ ID NO: 1453 - protein, 8 aa, Artificial sequence
  synthetic peptide
GSFNAPWA

SEQ ID NO: 1454 - protein, 8 aa, Artificial sequence
  synthetic peptide
SFNAPWAV

SEQ ID NO: 1455 - protein, 8 aa, Artificial sequence
  synthetic peptide
FNAPWAVT

SEQ ID NO: 1456 - protein, 8 aa, Artificial sequence
  synthetic peptide
NAPWAVTS

SEQ ID NO: 1457 - protein, 8 aa, Artificial sequence
  synthetic peptide
APWAVTSL

SEQ ID NO: 1458 - protein, 8 aa, Artificial sequence
  synthetic peptide
PWAVTSLY

SEQ ID NO: 1459 - protein, 8 aa, Artificial sequence
  synthetic peptide
WAVTSLYE

SEQ ID NO: 1460 - protein, 8 aa, Artificial sequence
  synthetic peptide
AVTSLYEA

SEQ ID NO: 1461 - protein, 8 aa, Artificial sequence
  synthetic peptide
VTSLYEAR

SEQ ID NO: 1462 - protein, 8 aa, Artificial sequence
  synthetic peptide
TSLYEARN

SEQ ID NO: 1463 - protein, 8 aa, Artificial sequence
  synthetic peptide
SLYEARNR

SEQ ID NO: 1464 - protein, 8 aa, Artificial sequence
  synthetic peptide
LYEARNRT

SEQ ID NO: 1465 - protein, 8 aa, Artificial sequence
  synthetic peptide
YEARNRTL

SEQ ID NO: 1466 - protein, 8 aa, Artificial sequence
  synthetic peptide
EARNRTLN

SEQ ID NO: 1467 - protein, 8 aa, Artificial sequence
  synthetic peptide
ARNRTLNL

SEQ ID NO: 1468 - protein, 8 aa, Artificial sequence
  synthetic peptide
RNRTLNLA

SEQ ID NO: 1469 - protein, 8 aa, Artificial sequence
  synthetic peptide
NRTLNLAK

SEQ ID NO: 1470 - protein, 8 aa, Artificial sequence
  synthetic peptide
RTLNLAKL

SEQ ID NO: 1471 - protein, 8 aa, Artificial sequence
  synthetic peptide
TLNLAKLT

SEQ ID NO: 1472 - protein, 8 aa, Artificial sequence
  synthetic peptide
LNLAKLTG

SEQ ID NO: 1473 - protein, 8 aa, Artificial sequence
  synthetic peptide
NLAKLTGC

SEQ ID NO: 1474 - protein, 8 aa, Artificial sequence
  synthetic peptide
LAKLTGCS

SEQ ID NO: 1475 - protein, 8 aa, Artificial sequence
  synthetic peptide
AKLTGCSR

SEQ ID NO: 1476 - protein, 8 aa, Artificial sequence
  synthetic peptide
KLTGCSRE

SEQ ID NO: 1477 - protein, 8 aa, Artificial sequence
  synthetic peptide
LTGCSREN

SEQ ID NO: 1478 - protein, 8 aa, Artificial sequence
  synthetic peptide
TGCSRENE

SEQ ID NO: 1479 - protein, 8 aa, Artificial sequence
  synthetic peptide
GCSRENET

SEQ ID NO: 1480 - protein, 8 aa, Artificial sequence
  synthetic peptide
CSRENETE

SEQ ID NO: 1481 - protein, 8 aa, Artificial sequence
  synthetic peptide
SRENETEI

SEQ ID NO: 1482 - protein, 8 aa, Artificial sequence
  synthetic peptide
RENETEII

SEQ ID NO: 1483 - protein, 8 aa, Artificial sequence
  synthetic peptide
ENETEIIK

SEQ ID NO: 1484 - protein, 8 aa, Artificial sequence
  synthetic peptide
NETEIIKC

SEQ ID NO: 1485 - protein, 8 aa, Artificial sequence
  synthetic peptide
ETEIIKCL

SEQ ID NO: 1486 - protein, 8 aa, Artificial sequence
  synthetic peptide
TEIIKCLR

SEQ ID NO: 1487 - protein, 8 aa, Artificial sequence
  synthetic peptide
EIIKCLRN

SEQ ID NO: 1488 - protein, 8 aa, Artificial sequence
  synthetic peptide
IIKCLRNK

SEQ ID NO: 1489 - protein, 8 aa, Artificial sequence
  synthetic peptide
IKCLRNKD

SEQ ID NO: 1490 - protein, 8 aa, Artificial sequence
  synthetic peptide
KCLRNKDP

SEQ ID NO: 1491 - protein, 8 aa, Artificial sequence
  synthetic peptide
CLRNKDPQ

SEQ ID NO: 1492 - protein, 8 aa, Artificial sequence
  synthetic peptide
LRNKDPQE

SEQ ID NO: 1493 - protein, 8 aa, Artificial sequence
  synthetic peptide
RNKDPQEI

SEQ ID NO: 1494 - protein, 8 aa, Artificial sequence
  synthetic peptide
NKDPQEIL

SEQ ID NO: 1495 - protein, 8 aa, Artificial sequence
  synthetic peptide
KDPQEILL

SEQ ID NO: 1496 - protein, 8 aa, Artificial sequence
  synthetic peptide
DPQEILLN

SEQ ID NO: 1497 - protein, 8 aa, Artificial sequence
  synthetic peptide
PQEILLNE

SEQ ID NO: 1498 - protein, 8 aa, Artificial sequence
  synthetic peptide
QEILLNEA

SEQ ID NO: 1499 - protein, 8 aa, Artificial sequence
  synthetic peptide
EILLNEAF

SEQ ID NO: 1500 - protein, 8 aa, Artificial sequence
  synthetic peptide
ILLNEAFV

SEQ ID NO: 1501 - protein, 8 aa, Artificial sequence
  synthetic peptide
LLNEAFVV

SEQ ID NO: 1502 - protein, 8 aa, Artificial sequence
  synthetic peptide
LNEAFVVP

SEQ ID NO: 1503 - protein, 8 aa, Artificial sequence
  synthetic peptide
NEAFVVPY

SEQ ID NO: 1504 - protein, 8 aa, Artificial sequence
  synthetic peptide
EAFVVPYG

SEQ ID NO: 1505 - protein, 8 aa, Artificial sequence
  synthetic peptide
AFVVPYGT

SEQ ID NO: 1506 - protein, 8 aa, Artificial sequence
  synthetic peptide
FVVPYGTP

SEQ ID NO: 1507 - protein, 8 aa, Artificial sequence
  synthetic peptide
VVPYGTPL

SEQ ID NO: 1508 - protein, 8 aa, Artificial sequence
  synthetic peptide
VPYGTPLS

SEQ ID NO: 1509 - protein, 8 aa, Artificial sequence
  synthetic peptide
PYGTPLSV

SEQ ID NO: 1510 - protein, 8 aa, Artificial sequence
  synthetic peptide
YGTPLSVN

SEQ ID NO: 1511 - protein, 8 aa, Artificial sequence
  synthetic peptide
GTPLSVNF

SEQ ID NO: 1512 - protein, 8 aa, Artificial sequence
  synthetic peptide
TPLSVNFG

SEQ ID NO: 1513 - protein, 8 aa, Artificial sequence
  synthetic peptide
PLSVNFGP

SEQ ID NO: 1514 - protein, 8 aa, Artificial sequence
  synthetic peptide
LSVNFGPT

SEQ ID NO: 1515 - protein, 8 aa, Artificial sequence
  synthetic peptide
SVNFGPTV

SEQ ID NO: 1516 - protein, 8 aa, Artificial sequence
  synthetic peptide
VNFGPTVD

SEQ ID NO: 1517 - protein, 8 aa, Artificial sequence
  synthetic peptide
NFGPTVDG

SEQ ID NO: 1518 - protein, 8 aa, Artificial sequence
  synthetic peptide
FGPTVDGD

SEQ ID NO: 1519 - protein, 8 aa, Artificial sequence
  synthetic peptide
GPTVDGDF

SEQ ID NO: 1520 - protein, 8 aa, Artificial sequence
  synthetic peptide
PTVDGDFL

SEQ ID NO: 1521 - protein, 8 aa, Artificial sequence
  synthetic peptide
TVDGDFLT

SEQ ID NO: 1522 - protein, 8 aa, Artificial sequence
  synthetic peptide
VDGDFLTD

SEQ ID NO: 1523 - protein, 8 aa, Artificial sequence
  synthetic peptide
DGDFLTDM

SEQ ID NO: 1524 - protein, 8 aa, Artificial sequence
  synthetic peptide
GDFLTDMP

SEQ ID NO: 1525 - protein, 8 aa, Artificial sequence
  synthetic peptide
DFLTDMPD

SEQ ID NO: 1526 - protein, 8 aa, Artificial sequence
  synthetic peptide
FLTDMPDI

SEQ ID NO: 1527 - protein, 8 aa, Artificial sequence
  synthetic peptide
LTDMPDIL

SEQ ID NO: 1528 - protein, 8 aa, Artificial sequence
  synthetic peptide
TDMPDILL

SEQ ID NO: 1529 - protein, 8 aa, Artificial sequence
  synthetic peptide
DMPDILLE

SEQ ID NO: 1530 - protein, 8 aa, Artificial sequence
  synthetic peptide
MPDILLEL

SEQ ID NO: 1531 - protein, 8 aa, Artificial sequence
  synthetic peptide
PDILLELG

SEQ ID NO: 1532 - protein, 8 aa, Artificial sequence
  synthetic peptide
DILLELGQ

SEQ ID NO: 1533 - protein, 8 aa, Artificial sequence
  synthetic peptide
ILLELGQF

SEQ ID NO: 1534 - protein, 8 aa, Artificial sequence
  synthetic peptide
LLELGQFK

SEQ ID NO: 1535 - protein, 8 aa, Artificial sequence
  synthetic peptide
LELGQFKK

SEQ ID NO: 1536 - protein, 8 aa, Artificial sequence
  synthetic peptide
ELGQFKKT

SEQ ID NO: 1537 - protein, 8 aa, Artificial sequence
  synthetic peptide
LGQFKKTQ

SEQ ID NO: 1538 - protein, 8 aa, Artificial sequence
  synthetic peptide
GQFKKTQI

SEQ ID NO: 1539 - protein, 8 aa, Artificial sequence
  synthetic peptide
QFKKTQIL

SEQ ID NO: 1540 - protein, 8 aa, Artificial sequence
  synthetic peptide
FKKTQILV

SEQ ID NO: 1541 - protein, 8 aa, Artificial sequence
  synthetic peptide
KKTQILVG

SEQ ID NO: 1542 - protein, 8 aa, Artificial sequence
  synthetic peptide
KTQILVGV

SEQ ID NO: 1543 - protein, 8 aa, Artificial sequence
  synthetic peptide
TQILVGVN

SEQ ID NO: 1544 - protein, 8 aa, Artificial sequence
  synthetic peptide
QILVGVNK

SEQ ID NO: 1545 - protein, 8 aa, Artificial sequence
  synthetic peptide
ILVGVNKD

SEQ ID NO: 1546 - protein, 8 aa, Artificial sequence
  synthetic peptide
LVGVNKDE

SEQ ID NO: 1547 - protein, 8 aa, Artificial sequence
  synthetic peptide
VGVNKDEG

SEQ ID NO: 1548 - protein, 8 aa, Artificial sequence
  synthetic peptide
GVNKDEGT

SEQ ID NO: 1549 - protein, 8 aa, Artificial sequence
  synthetic peptide
VNKDEGTA

SEQ ID NO: 1550 - protein, 8 aa, Artificial sequence
  synthetic peptide
NKDEGTAF

SEQ ID NO: 1551 - protein, 8 aa, Artificial sequence
  synthetic peptide
KDEGTAFL

SEQ ID NO: 1552 - protein, 8 aa, Artificial sequence
  synthetic peptide
DEGTAFLV

SEQ ID NO: 1553 - protein, 8 aa, Artificial sequence
  synthetic peptide
EGTAFLVY

SEQ ID NO: 1554 - protein, 8 aa, Artificial sequence
  synthetic peptide
GTAFLVYG

SEQ ID NO: 1555 - protein, 8 aa, Artificial sequence
  synthetic peptide
TAFLVYGA

SEQ ID NO: 1556 - protein, 8 aa, Artificial sequence
  synthetic peptide
AFLVYGAP

SEQ ID NO: 1557 - protein, 8 aa, Artificial sequence
  synthetic peptide
FLVYGAPG

SEQ ID NO: 1558 - protein, 8 aa, Artificial sequence
  synthetic peptide
LVYGAPGF

SEQ ID NO: 1559 - protein, 8 aa, Artificial sequence
  synthetic peptide
VYGAPGFS

SEQ ID NO: 1560 - protein, 8 aa, Artificial sequence
  synthetic peptide
YGAPGFSK

SEQ ID NO: 1561 - protein, 8 aa, Artificial sequence
  synthetic peptide
GAPGFSKD

SEQ ID NO: 1562 - protein, 8 aa, Artificial sequence
  synthetic peptide
APGFSKDN

SEQ ID NO: 1563 - protein, 8 aa, Artificial sequence
  synthetic peptide
PGFSKDNN

SEQ ID NO: 1564 - protein, 8 aa, Artificial sequence
  synthetic peptide
GFSKDNNS

SEQ ID NO: 1565 - protein, 8 aa, Artificial sequence
  synthetic peptide
FSKDNNSI

SEQ ID NO: 1566 - protein, 8 aa, Artificial sequence
  synthetic peptide
SKDNNSII

SEQ ID NO: 1567 - protein, 8 aa, Artificial sequence
  synthetic peptide
KDNNSIIT

SEQ ID NO: 1568 - protein, 8 aa, Artificial sequence
  synthetic peptide
DNNSIITR

SEQ ID NO: 1569 - protein, 8 aa, Artificial sequence
  synthetic peptide
NNSIITRK

SEQ ID NO: 1570 - protein, 8 aa, Artificial sequence
  synthetic peptide
NSIITRKE

SEQ ID NO: 1571 - protein, 8 aa, Artificial sequence
  synthetic peptide
SIITRKEF

SEQ ID NO: 1572 - protein, 8 aa, Artificial sequence
  synthetic peptide
IITRKEFQ

SEQ ID NO: 1573 - protein, 8 aa, Artificial sequence
  synthetic peptide
ITRKEFQE

SEQ ID NO: 1574 - protein, 8 aa, Artificial sequence
  synthetic peptide
TRKEFQEG

SEQ ID NO: 1575 - protein, 8 aa, Artificial sequence
  synthetic peptide
RKEFQEGL

SEQ ID NO: 1576 - protein, 8 aa, Artificial sequence
  synthetic peptide
KEFQEGLK

SEQ ID NO: 1577 - protein, 8 aa, Artificial sequence
  synthetic peptide
EFQEGLKI

SEQ ID NO: 1578 - protein, 8 aa, Artificial sequence
  synthetic peptide
FQEGLKIF

SEQ ID NO: 1579 - protein, 8 aa, Artificial sequence
  synthetic peptide
QEGLKIFF

SEQ ID NO: 1580 - protein, 8 aa, Artificial sequence
  synthetic peptide
EGLKIFFP

SEQ ID NO: 1581 - protein, 8 aa, Artificial sequence
  synthetic peptide
GLKIFFPG

SEQ ID NO: 1582 - protein, 8 aa, Artificial sequence
  synthetic peptide
LKIFFPGV

SEQ ID NO: 1583 - protein, 8 aa, Artificial sequence
  synthetic peptide
KIFFPGVS

SEQ ID NO: 1584 - protein, 8 aa, Artificial sequence
  synthetic peptide
IFFPGVSE

SEQ ID NO: 1585 - protein, 8 aa, Artificial sequence
  synthetic peptide
FFPGVSEF

SEQ ID NO: 1586 - protein, 8 aa, Artificial sequence
  synthetic peptide
FPGVSEFG

SEQ ID NO: 1587 - protein, 8 aa, Artificial sequence
  synthetic peptide
PGVSEFGK

SEQ ID NO: 1588 - protein, 8 aa, Artificial sequence
  synthetic peptide
GVSEFGKE

SEQ ID NO: 1589 - protein, 8 aa, Artificial sequence
  synthetic peptide
VSEFGKES

SEQ ID NO: 1590 - protein, 8 aa, Artificial sequence
  synthetic peptide
SEFGKESI

SEQ ID NO: 1591 - protein, 8 aa, Artificial sequence
  synthetic peptide
EFGKESIL

SEQ ID NO: 1592 - protein, 8 aa, Artificial sequence
  synthetic peptide
FGKESILF

SEQ ID NO: 1593 - protein, 8 aa, Artificial sequence
  synthetic peptide
GKESILFH

SEQ ID NO: 1594 - protein, 8 aa, Artificial sequence
  synthetic peptide
KESILFHY

SEQ ID NO: 1595 - protein, 8 aa, Artificial sequence
  synthetic peptide
ESILFHYT

SEQ ID NO: 1596 - protein, 8 aa, Artificial sequence
  synthetic peptide
SILFHYTD

SEQ ID NO: 1597 - protein, 8 aa, Artificial sequence
  synthetic peptide
ILFHYTDW

SEQ ID NO: 1598 - protein, 8 aa, Artificial sequence
  synthetic peptide
LFHYTDWV

SEQ ID NO: 1599 - protein, 8 aa, Artificial sequence
  synthetic peptide
FHYTDWVD

SEQ ID NO: 1600 - protein, 8 aa, Artificial sequence
  synthetic peptide
HYTDWVDD

SEQ ID NO: 1601 - protein, 8 aa, Artificial sequence
  synthetic peptide
YTDWVDDQ

SEQ ID NO: 1602 - protein, 8 aa, Artificial sequence
  synthetic peptide
TDWVDDQR

SEQ ID NO: 1603 - protein, 8 aa, Artificial sequence
  synthetic peptide
DWVDDQRP

SEQ ID NO: 1604 - protein, 8 aa, Artificial sequence
  synthetic peptide
WVDDQRPE

SEQ ID NO: 1605 - protein, 8 aa, Artificial sequence
  synthetic peptide
VDDQRPEN

SEQ ID NO: 1606 - protein, 8 aa, Artificial sequence
  synthetic peptide
DDQRPENY

SEQ ID NO: 1607 - protein, 8 aa, Artificial sequence
  synthetic peptide
DQRPENYR

SEQ ID NO: 1608 - protein, 8 aa, Artificial sequence
  synthetic peptide
QRPENYRE

SEQ ID NO: 1609 - protein, 8 aa, Artificial sequence
  synthetic peptide
RPENYREA

SEQ ID NO: 1610 - protein, 8 aa, Artificial sequence
  synthetic peptide
PENYREAL

SEQ ID NO: 1611 - protein, 8 aa, Artificial sequence
  synthetic peptide
ENYREALG

SEQ ID NO: 1612 - protein, 8 aa, Artificial sequence
  synthetic peptide
NYREALGD

SEQ ID NO: 1613 - protein, 8 aa, Artificial sequence
  synthetic peptide
YREALGDV

SEQ ID NO: 1614 - protein, 8 aa, Artificial sequence
  synthetic peptide
REALGDVV

SEQ ID NO: 1615 - protein, 8 aa, Artificial sequence
  synthetic peptide
EALGDVVG

SEQ ID NO: 1616 - protein, 8 aa, Artificial sequence
  synthetic peptide
ALGDVVGD

SEQ ID NO: 1617 - protein, 8 aa, Artificial sequence
  synthetic peptide
LGDVVGDY

SEQ ID NO: 1618 - protein, 8 aa, Artificial sequence
  synthetic peptide
GDVVGDYN

SEQ ID NO: 1619 - protein, 8 aa, Artificial sequence
  synthetic peptide
DVVGDYNF

SEQ ID NO: 1620 - protein, 8 aa, Artificial sequence
  synthetic peptide
VVGDYNFI

SEQ ID NO: 1621 - protein, 8 aa, Artificial sequence
  synthetic peptide
VGDYNFIC

SEQ ID NO: 1622 - protein, 8 aa, Artificial sequence
  synthetic peptide
GDYNFICP

SEQ ID NO: 1623 - protein, 8 aa, Artificial sequence
  synthetic peptide
DYNFICPA

SEQ ID NO: 1624 - protein, 8 aa, Artificial sequence
  synthetic peptide
YNFICPAL

SEQ ID NO: 1625 - protein, 8 aa, Artificial sequence
  synthetic peptide
NFICPALE

SEQ ID NO: 1626 - protein, 8 aa, Artificial sequence
  synthetic peptide
FICPALEF

SEQ ID NO: 1627 - protein, 8 aa, Artificial sequence
  synthetic peptide
ICPALEFT

SEQ ID NO: 1628 - protein, 8 aa, Artificial sequence
  synthetic peptide
CPALEFTK

SEQ ID NO: 1629 - protein, 8 aa, Artificial sequence
  synthetic peptide
PALEFTKK

SEQ ID NO: 1630 - protein, 8 aa, Artificial sequence
  synthetic peptide
ALEFTKKF

SEQ ID NO: 1631 - protein, 8 aa, Artificial sequence
  synthetic peptide
LEFTKKFS

SEQ ID NO: 1632 - protein, 8 aa, Artificial sequence
  synthetic peptide
EFTKKFSE

SEQ ID NO: 1633 - protein, 8 aa, Artificial sequence
  synthetic peptide
FTKKFSEW

SEQ ID NO: 1634 - protein, 8 aa, Artificial sequence
  synthetic peptide
TKKFSEWG

SEQ ID NO: 1635 - protein, 8 aa, Artificial sequence
  synthetic peptide
KKFSEWGN

SEQ ID NO: 1636 - protein, 8 aa, Artificial sequence
  synthetic peptide
KFSEWGNN

SEQ ID NO: 1637 - protein, 8 aa, Artificial sequence
  synthetic peptide
FSEWGNNA

SEQ ID NO: 1638 - protein, 8 aa, Artificial sequence
  synthetic peptide
SEWGNNAF

SEQ ID NO: 1639 - protein, 8 aa, Artificial sequence
  synthetic peptide
EWGNNAFF

SEQ ID NO: 1640 - protein, 8 aa, Artificial sequence
  synthetic peptide
WGNNAFFY

SEQ ID NO: 1641 - protein, 8 aa, Artificial sequence
  synthetic peptide
GNNAFFYY

SEQ ID NO: 1642 - protein, 8 aa, Artificial sequence
  synthetic peptide
NNAFFYYF

SEQ ID NO: 1643 - protein, 8 aa, Artificial sequence
  synthetic peptide
NAFFYYFE

SEQ ID NO: 1644 - protein, 8 aa, Artificial sequence
  synthetic peptide
AFFYYFEH

SEQ ID NO: 1645 - protein, 8 aa, Artificial sequence
  synthetic peptide
FFYYFEHR

SEQ ID NO: 1646 - protein, 8 aa, Artificial sequence
  synthetic peptide
FYYFEHRS

SEQ ID NO: 1647 - protein, 8 aa, Artificial sequence
  synthetic peptide
YYFEHRSS

SEQ ID NO: 1648 - protein, 8 aa, Artificial sequence
  synthetic peptide
YFEHRSSK

SEQ ID NO: 1649 - protein, 8 aa, Artificial sequence
  synthetic peptide
FEHRSSKL

SEQ ID NO: 1650 - protein, 8 aa, Artificial sequence
  synthetic peptide
EHRSSKLP

SEQ ID NO: 1651 - protein, 8 aa, Artificial sequence
  synthetic peptide
HRSSKLPW

SEQ ID NO: 1652 - protein, 8 aa, Artificial sequence
  synthetic peptide
RSSKLPWP

SEQ ID NO: 1653 - protein, 8 aa, Artificial sequence
  synthetic peptide
SSKLPWPE

SEQ ID NO: 1654 - protein, 8 aa, Artificial sequence
  synthetic peptide
SKLPWPEW

SEQ ID NO: 1655 - protein, 8 aa, Artificial sequence
  synthetic peptide
KLPWPEWM

SEQ ID NO: 1656 - protein, 8 aa, Artificial sequence
  synthetic peptide
LPWPEWMG

SEQ ID NO: 1657 - protein, 8 aa, Artificial sequence
  synthetic peptide
PWPEWMGV

SEQ ID NO: 1658 - protein, 8 aa, Artificial sequence
  synthetic peptide
WPEWMGVM

SEQ ID NO: 1659 - protein, 8 aa, Artificial sequence
  synthetic peptide
PEWMGVMH

SEQ ID NO: 1660 - protein, 8 aa, Artificial sequence
  synthetic peptide
EWMGVMHG

SEQ ID NO: 1661 - protein, 8 aa, Artificial sequence
  synthetic peptide
WMGVMHGY

SEQ ID NO: 1662 - protein, 8 aa, Artificial sequence
  synthetic peptide
MGVMHGYE

SEQ ID NO: 1663 - protein, 8 aa, Artificial sequence
  synthetic peptide
GVMHGYEI

SEQ ID NO: 1664 - protein, 8 aa, Artificial sequence
  synthetic peptide
VMHGYEIE

SEQ ID NO: 1665 - protein, 8 aa, Artificial sequence
  synthetic peptide
MHGYEIEF

SEQ ID NO: 1666 - protein, 8 aa, Artificial sequence
  synthetic peptide
HGYEIEFV

SEQ ID NO: 1667 - protein, 8 aa, Artificial sequence
  synthetic peptide
GYEIEFVF

SEQ ID NO: 1668 - protein, 8 aa, Artificial sequence
  synthetic peptide
YEIEFVFG

SEQ ID NO: 1669 - protein, 8 aa, Artificial sequence
  synthetic peptide
EIEFVFGL

SEQ ID NO: 1670 - protein, 8 aa, Artificial sequence
  synthetic peptide
IEFVFGLP

SEQ ID NO: 1671 - protein, 8 aa, Artificial sequence
  synthetic peptide
EFVFGLPL

SEQ ID NO: 1672 - protein, 8 aa, Artificial sequence
  synthetic peptide
FVFGLPLE

SEQ ID NO: 1673 - protein, 8 aa, Artificial sequence
  synthetic peptide
VFGLPLER

SEQ ID NO: 1674 - protein, 8 aa, Artificial sequence
  synthetic peptide
FGLPLERR

SEQ ID NO: 1675 - protein, 8 aa, Artificial sequence
  synthetic peptide
GLPLERRD

SEQ ID NO: 1676 - protein, 8 aa, Artificial sequence
  synthetic peptide
LPLERRDN

SEQ ID NO: 1677 - protein, 8 aa, Artificial sequence
  synthetic peptide
PLERRDNY

SEQ ID NO: 1678 - protein, 8 aa, Artificial sequence
  synthetic peptide
LERRDNYT

SEQ ID NO: 1679 - protein, 8 aa, Artificial sequence
  synthetic peptide
ERRDNYTK

SEQ ID NO: 1680 - protein, 8 aa, Artificial sequence
  synthetic peptide
RRDNYTKA

SEQ ID NO: 1681 - protein, 8 aa, Artificial sequence
  synthetic peptide
RDNYTKAE

SEQ ID NO: 1682 - protein, 8 aa, Artificial sequence
  synthetic peptide
DNYTKAEE

SEQ ID NO: 1683 - protein, 8 aa, Artificial sequence
  synthetic peptide
NYTKAEEI

SEQ ID NO: 1684 - protein, 8 aa, Artificial sequence
  synthetic peptide
YTKAEEIL

SEQ ID NO: 1685 - protein, 8 aa, Artificial sequence
  synthetic peptide
TKAEEILS

SEQ ID NO: 1686 - protein, 8 aa, Artificial sequence
  synthetic peptide
KAEEILSR

SEQ ID NO: 1687 - protein, 8 aa, Artificial sequence
  synthetic peptide
AEEILSRS

SEQ ID NO: 1688 - protein, 8 aa, Artificial sequence
  synthetic peptide
EEILSRSI

SEQ ID NO: 1689 - protein, 8 aa, Artificial sequence
  synthetic peptide
EILSRSIV

SEQ ID NO: 1690 - protein, 8 aa, Artificial sequence
  synthetic peptide
ILSRSIVK

SEQ ID NO: 1691 - protein, 8 aa, Artificial sequence
  synthetic peptide
LSRSIVKR

SEQ ID NO: 1692 - protein, 8 aa, Artificial sequence
  synthetic peptide
SRSIVKRW

SEQ ID NO: 1693 - protein, 8 aa, Artificial sequence
  synthetic peptide
RSIVKRWA

SEQ ID NO: 1694 - protein, 8 aa, Artificial sequence
  synthetic peptide
SIVKRWAN

SEQ ID NO: 1695 - protein, 8 aa, Artificial sequence
  synthetic peptide
IVKRWANF

SEQ ID NO: 1696 - protein, 8 aa, Artificial sequence
  synthetic peptide
VKRWANFA

SEQ ID NO: 1697 - protein, 8 aa, Artificial sequence
  synthetic peptide
KRWANFAK

SEQ ID NO: 1698 - protein, 8 aa, Artificial sequence
  synthetic peptide
RWANFAKY

SEQ ID NO: 1699 - protein, 8 aa, Artificial sequence
  synthetic peptide
WANFAKYG

SEQ ID NO: 1700 - protein, 8 aa, Artificial sequence
  synthetic peptide
ANFAKYGN

SEQ ID NO: 1701 - protein, 8 aa, Artificial sequence
  synthetic peptide
NFAKYGNP

SEQ ID NO: 1702 - protein, 8 aa, Artificial sequence
  synthetic peptide
FAKYGNPN

SEQ ID NO: 1703 - protein, 8 aa, Artificial sequence
  synthetic peptide
AKYGNPNE

SEQ ID NO: 1704 - protein, 8 aa, Artificial sequence
  synthetic peptide
KYGNPNET

SEQ ID NO: 1705 - protein, 8 aa, Artificial sequence
  synthetic peptide
YGNPNETQ

SEQ ID NO: 1706 - protein, 8 aa, Artificial sequence
  synthetic peptide
GNPNETQN

SEQ ID NO: 1707 - protein, 8 aa, Artificial sequence
  synthetic peptide
NPNETQNN

SEQ ID NO: 1708 - protein, 8 aa, Artificial sequence
  synthetic peptide
PNETQNNS

SEQ ID NO: 1709 - protein, 8 aa, Artificial sequence
  synthetic peptide
NETQNNST

SEQ ID NO: 1710 - protein, 8 aa, Artificial sequence
  synthetic peptide
ETQNNSTS

SEQ ID NO: 1711 - protein, 8 aa, Artificial sequence
  synthetic peptide
TQNNSTSW

SEQ ID NO: 1712 - protein, 8 aa, Artificial sequence
  synthetic peptide
QNNSTSWP

SEQ ID NO: 1713 - protein, 8 aa, Artificial sequence
  synthetic peptide
NNSTSWPV

SEQ ID NO: 1714 - protein, 8 aa, Artificial sequence
  synthetic peptide
NSTSWPVF

SEQ ID NO: 1715 - protein, 8 aa, Artificial sequence
  synthetic peptide
STSWPVFK

SEQ ID NO: 1716 - protein, 8 aa, Artificial sequence
  synthetic peptide
TSWPVFKS

SEQ ID NO: 1717 - protein, 8 aa, Artificial sequence
  synthetic peptide
SWPVFKST

SEQ ID NO: 1718 - protein, 8 aa, Artificial sequence
  synthetic peptide
WPVFKSTE

SEQ ID NO: 1719 - protein, 8 aa, Artificial sequence
  synthetic peptide
PVFKSTEQ

SEQ ID NO: 1720 - protein, 8 aa, Artificial sequence
  synthetic peptide
VFKSTEQK

SEQ ID NO: 1721 - protein, 8 aa, Artificial sequence
  synthetic peptide
FKSTEQKY

SEQ ID NO: 1722 - protein, 8 aa, Artificial sequence
  synthetic peptide
KSTEQKYL

SEQ ID NO: 1723 - protein, 8 aa, Artificial sequence
  synthetic peptide
STEQKYLT

SEQ ID NO: 1724 - protein, 8 aa, Artificial sequence
  synthetic peptide
TEQKYLTL

SEQ ID NO: 1725 - protein, 8 aa, Artificial sequence
  synthetic peptide
EQKYLTLN

SEQ ID NO: 1726 - protein, 8 aa, Artificial sequence
  synthetic peptide
QKYLTLNT

SEQ ID NO: 1727 - protein, 8 aa, Artificial sequence
  synthetic peptide
KYLTLNTE

SEQ ID NO: 1728 - protein, 8 aa, Artificial sequence
  synthetic peptide
YLTLNTES

SEQ ID NO: 1729 - protein, 8 aa, Artificial sequence
  synthetic peptide
LTLNTEST

SEQ ID NO: 1730 - protein, 8 aa, Artificial sequence
  synthetic peptide
TLNTESTR

SEQ ID NO: 1731 - protein, 8 aa, Artificial sequence
  synthetic peptide
LNTESTRI

SEQ ID NO: 1732 - protein, 8 aa, Artificial sequence
  synthetic peptide
NTESTRIM

SEQ ID NO: 1733 - protein, 8 aa, Artificial sequence
  synthetic peptide
TESTRIMT

SEQ ID NO: 1734 - protein, 8 aa, Artificial sequence
  synthetic peptide
ESTRIMTK

SEQ ID NO: 1735 - protein, 8 aa, Artificial sequence
  synthetic peptide
STRIMTKL

SEQ ID NO: 1736 - protein, 8 aa, Artificial sequence
  synthetic peptide
TRIMTKLR

SEQ ID NO: 1737 - protein, 8 aa, Artificial sequence
  synthetic peptide
RIMTKLRA

SEQ ID NO: 1738 - protein, 8 aa, Artificial sequence
  synthetic peptide
IMTKLRAQ

SEQ ID NO: 1739 - protein, 8 aa, Artificial sequence
  synthetic peptide
MTKLRAQQ

SEQ ID NO: 1740 - protein, 8 aa, Artificial sequence
  synthetic peptide
TKLRAQQC

SEQ ID NO: 1741 - protein, 8 aa, Artificial sequence
  synthetic peptide
KLRAQQCR

SEQ ID NO: 1742 - protein, 8 aa, Artificial sequence
  synthetic peptide
LRAQQCRF

SEQ ID NO: 1743 - protein, 8 aa, Artificial sequence
  synthetic peptide
RAQQCRFW

SEQ ID NO: 1744 - protein, 8 aa, Artificial sequence
  synthetic peptide
AQQCRFWT

SEQ ID NO: 1745 - protein, 8 aa, Artificial sequence
  synthetic peptide
QQCRFWTS

SEQ ID NO: 1746 - protein, 8 aa, Artificial sequence
  synthetic peptide
QCRFWTSF

SEQ ID NO: 1747 - protein, 8 aa, Artificial sequence
  synthetic peptide
CRFWTSFF

SEQ ID NO: 1748 - protein, 8 aa, Artificial sequence
  synthetic peptide
RFWTSFFP

SEQ ID NO: 1749 - protein, 8 aa, Artificial sequence
  synthetic peptide
FWTSFFPK

SEQ ID NO: 1750 - protein, 8 aa, Artificial sequence
  synthetic peptide
WTSFFPKV

SEQ ID NO: 1751 - protein, 8 aa, Artificial sequence
  synthetic peptide
TSFFPKVL

SEQ ID NO: 1752 - protein, 8 aa, Artificial sequence
  synthetic peptide
SFFPKVLE

SEQ ID NO: 1753 - protein, 8 aa, Artificial sequence
  synthetic peptide
FFPKVLEM

SEQ ID NO: 1754 - protein, 8 aa, Artificial sequence
  synthetic peptide
FPKVLEMT

SEQ ID NO: 1755 - protein, 8 aa, Artificial sequence
  synthetic peptide
PKVLEMTG

SEQ ID NO: 1756 - protein, 8 aa, Artificial sequence
  synthetic peptide
KVLEMTGN

SEQ ID NO: 1757 - protein, 8 aa, Artificial sequence
  synthetic peptide
VLEMTGNI

SEQ ID NO: 1758 - protein, 8 aa, Artificial sequence
  synthetic peptide
LEMTGNID

SEQ ID NO: 1759 - protein, 8 aa, Artificial sequence
  synthetic peptide
EMTGNIDE

SEQ ID NO: 1760 - protein, 8 aa, Artificial sequence
  synthetic peptide
MTGNIDEA

SEQ ID NO: 1761 - protein, 8 aa, Artificial sequence
  synthetic peptide
TGNIDEAE

SEQ ID NO: 1762 - protein, 8 aa, Artificial sequence
  synthetic peptide
GNIDEAEW

SEQ ID NO: 1763 - protein, 8 aa, Artificial sequence
  synthetic peptide
NIDEAEWE

SEQ ID NO: 1764 - protein, 8 aa, Artificial sequence
  synthetic peptide
IDEAEWEW

SEQ ID NO: 1765 - protein, 8 aa, Artificial sequence
  synthetic peptide
DEAEWEWK

SEQ ID NO: 1766 - protein, 8 aa, Artificial sequence
  synthetic peptide
EAEWEWKA

SEQ ID NO: 1767 - protein, 8 aa, Artificial sequence
  synthetic peptide
AEWEWKAG

SEQ ID NO: 1768 - protein, 8 aa, Artificial sequence
  synthetic peptide
EWEWKAGF

SEQ ID NO: 1769 - protein, 8 aa, Artificial sequence
  synthetic peptide
WEWKAGFH

SEQ ID NO: 1770 - protein, 8 aa, Artificial sequence
  synthetic peptide
EWKAGFHR

SEQ ID NO: 1771 - protein, 8 aa, Artificial sequence
  synthetic peptide
WKAGFHRW

SEQ ID NO: 1772 - protein, 8 aa, Artificial sequence
  synthetic peptide
KAGFHRWN

SEQ ID NO: 1773 - protein, 8 aa, Artificial sequence
  synthetic peptide
AGFHRWNN

SEQ ID NO: 1774 - protein, 8 aa, Artificial sequence
  synthetic peptide
GFHRWNNY

SEQ ID NO: 1775 - protein, 8 aa, Artificial sequence
  synthetic peptide
FHRWNNYM

SEQ ID NO: 1776 - protein, 8 aa, Artificial sequence
  synthetic peptide
HRWNNYMM

SEQ ID NO: 1777 - protein, 8 aa, Artificial sequence
  synthetic peptide
RWNNYMMD

SEQ ID NO: 1778 - protein, 8 aa, Artificial sequence
  synthetic peptide
WNNYMMDW

SEQ ID NO: 1779 - protein, 8 aa, Artificial sequence
  synthetic peptide
NNYMMDWK

SEQ ID NO: 1780 - protein, 8 aa, Artificial sequence
  synthetic peptide
NYMMDWKN

SEQ ID NO: 1781 - protein, 8 aa, Artificial sequence
  synthetic peptide
YMMDWKNQ

SEQ ID NO: 1782 - protein, 8 aa, Artificial sequence
  synthetic peptide
MMDWKNQF

SEQ ID NO: 1783 - protein, 8 aa, Artificial sequence
  synthetic peptide
MDWKNQFN

SEQ ID NO: 1784 - protein, 8 aa, Artificial sequence
  synthetic peptide
DWKNQFND

SEQ ID NO: 1785 - protein, 8 aa, Artificial sequence
  synthetic peptide
WKNQFNDY

SEQ ID NO: 1786 - protein, 8 aa, Artificial sequence
  synthetic peptide
KNQFNDYT

SEQ ID NO: 1787 - protein, 8 aa, Artificial sequence
  synthetic peptide
NQFNDYTS

SEQ ID NO: 1788 - protein, 8 aa, Artificial sequence
  synthetic peptide
QFNDYTSK

SEQ ID NO: 1789 - protein, 8 aa, Artificial sequence
  synthetic peptide
FNDYTSKK

SEQ ID NO: 1790 - protein, 8 aa, Artificial sequence
  synthetic peptide
NDYTSKKE

SEQ ID NO: 1791 - protein, 8 aa, Artificial sequence
  synthetic peptide
DYTSKKES

SEQ ID NO: 1792 - protein, 8 aa, Artificial sequence
  synthetic peptide
YTSKKESC

SEQ ID NO: 1793 - protein, 8 aa, Artificial sequence
  synthetic peptide
TSKKESCV

SEQ ID NO: 1794 - protein, 8 aa, Artificial sequence
  synthetic peptide
SKKESCVG

SEQ ID NO: 1795 - protein, 8 aa, Artificial sequence
  synthetic peptide
KKESCVGL

SEQ ID NO: 1796 - protein, 9 aa, Artificial sequence
  synthetic peptide
MHSKVTIIC

SEQ ID NO: 1797 - protein, 9 aa, Artificial sequence
  synthetic peptide
HSKVTIICI

SEQ ID NO: 1798 - protein, 9 aa, Artificial sequence
  synthetic peptide
SKVTIICIR

SEQ ID NO: 1799 - protein, 9 aa, Artificial sequence
  synthetic peptide
KVTIICIRF

SEQ ID NO: 1800 - protein, 9 aa, Artificial sequence
  synthetic peptide
VTIICIRFL

SEQ ID NO: 1801 - protein, 9 aa, Artificial sequence
  synthetic peptide
TIICIRFLF

SEQ ID NO: 1802 - protein, 9 aa, Artificial sequence
  synthetic peptide
IICIRFLFW

SEQ ID NO: 1803 - protein, 9 aa, Artificial sequence
  synthetic peptide
ICIRFLFWF

SEQ ID NO: 1804 - protein, 9 aa, Artificial sequence
  synthetic peptide
CIRFLFWFL

SEQ ID NO: 1805 - protein, 9 aa, Artificial sequence
  synthetic peptide
IRFLFWFLL

SEQ ID NO: 1806 - protein, 9 aa, Artificial sequence
  synthetic peptide
RFLFWFLLL

SEQ ID NO: 1807 - protein, 9 aa, Artificial sequence
  synthetic peptide
FLFWFLLLC

SEQ ID NO: 1808 - protein, 9 aa, Artificial sequence
  synthetic peptide
LFWFLLLCM

SEQ ID NO: 1809 - protein, 9 aa, Artificial sequence
  synthetic peptide
FWFLLLCML

SEQ ID NO: 1810 - protein, 9 aa, Artificial sequence
  synthetic peptide
WFLLLCMLI

SEQ ID NO: 1811 - protein, 9 aa, Artificial sequence
  synthetic peptide
FLLLCMLIG

SEQ ID NO: 1812 - protein, 9 aa, Artificial sequence
  synthetic peptide
LLLCMLIGK

SEQ ID NO: 1813 - protein, 9 aa, Artificial sequence
  synthetic peptide
LLCMLIGKS

SEQ ID NO: 1814 - protein, 9 aa, Artificial sequence
  synthetic peptide
LCMLIGKSH

SEQ ID NO: 1815 - protein, 9 aa, Artificial sequence
  synthetic peptide
CMLIGKSHT

SEQ ID NO: 1816 - protein, 9 aa, Artificial sequence
  synthetic peptide
MLIGKSHTE

SEQ ID NO: 1817 - protein, 9 aa, Artificial sequence
  synthetic peptide
LIGKSHTED

SEQ ID NO: 1818 - protein, 9 aa, Artificial sequence
  synthetic peptide
IGKSHTEDD

SEQ ID NO: 1819 - protein, 9 aa, Artificial sequence
  synthetic peptide
GKSHTEDDI

SEQ ID NO: 1820 - protein, 9 aa, Artificial sequence
  synthetic peptide
KSHTEDDII

SEQ ID NO: 1821 - protein, 9 aa, Artificial sequence
  synthetic peptide
SHTEDDIII

SEQ ID NO: 1822 - protein, 9 aa, Artificial sequence
  synthetic peptide
HTEDDIIIA

SEQ ID NO: 1823 - protein, 9 aa, Artificial sequence
  synthetic peptide
TEDDIIIAT

SEQ ID NO: 1824 - protein, 9 aa, Artificial sequence
  synthetic peptide
EDDIIIATK

SEQ ID NO: 1825 - protein, 9 aa, Artificial sequence
  synthetic peptide
DDIIIATKN

SEQ ID NO: 1826 - protein, 9 aa, Artificial sequence
  synthetic peptide
DIIIATKNG

SEQ ID NO: 1827 - protein, 9 aa, Artificial sequence
  synthetic peptide
IIIATKNGK

SEQ ID NO: 1828 - protein, 9 aa, Artificial sequence
  synthetic peptide
IIATKNGKV

SEQ ID NO: 1829 - protein, 9 aa, Artificial sequence
  synthetic peptide
IATKNGKVR

SEQ ID NO: 1830 - protein, 9 aa, Artificial sequence
  synthetic peptide
ATKNGKVRG

SEQ ID NO: 1831 - protein, 9 aa, Artificial sequence
  synthetic peptide
TKNGKVRGM

SEQ ID NO: 1832 - protein, 9 aa, Artificial sequence
  synthetic peptide
KNGKVRGMN

SEQ ID NO: 1833 - protein, 9 aa, Artificial sequence
  synthetic peptide
NGKVRGMNL

SEQ ID NO: 1834 - protein, 9 aa, Artificial sequence
  synthetic peptide
GKVRGMNLT

SEQ ID NO: 1835 - protein, 9 aa, Artificial sequence
  synthetic peptide
KVRGMNLTV

SEQ ID NO: 1836 - protein, 9 aa, Artificial sequence
  synthetic peptide
VRGMNLTVF

SEQ ID NO: 1837 - protein, 9 aa, Artificial sequence
  synthetic peptide
RGMNLTVFG

SEQ ID NO: 1838 - protein, 9 aa, Artificial sequence
  synthetic peptide
GMNLTVFGG

SEQ ID NO: 1839 - protein, 9 aa, Artificial sequence
  synthetic peptide
MNLTVFGGT

SEQ ID NO: 1840 - protein, 9 aa, Artificial sequence
  synthetic peptide
NLTVFGGTV

SEQ ID NO: 1841 - protein, 9 aa, Artificial sequence
  synthetic peptide
LTVFGGTVT

SEQ ID NO: 1842 - protein, 9 aa, Artificial sequence
  synthetic peptide
TVFGGTVTA

SEQ ID NO: 1843 - protein, 9 aa, Artificial sequence
  synthetic peptide
VFGGTVTAF

SEQ ID NO: 1844 - protein, 9 aa, Artificial sequence
  synthetic peptide
FGGTVTAFL

SEQ ID NO: 1845 - protein, 9 aa, Artificial sequence
  synthetic peptide
GGTVTAFLG

SEQ ID NO: 1846 - protein, 9 aa, Artificial sequence
  synthetic peptide
GTVTAFLGI

SEQ ID NO: 1847 - protein, 9 aa, Artificial sequence
  synthetic peptide
TVTAFLGIP

SEQ ID NO: 1848 - protein, 9 aa, Artificial sequence
  synthetic peptide
VTAFLGIPY

SEQ ID NO: 1849 - protein, 9 aa, Artificial sequence
  synthetic peptide
TAFLGIPYA

SEQ ID NO: 1850 - protein, 9 aa, Artificial sequence
  synthetic peptide
AFLGIPYAQ

SEQ ID NO: 1851 - protein, 9 aa, Artificial sequence
  synthetic peptide
FLGIPYAQP

SEQ ID NO: 1852 - protein, 9 aa, Artificial sequence
  synthetic peptide
LGIPYAQPP

SEQ ID NO: 1853 - protein, 9 aa, Artificial sequence
  synthetic peptide
GIPYAQPPL

SEQ ID NO: 1854 - protein, 9 aa, Artificial sequence
  synthetic peptide
IPYAQPPLG

SEQ ID NO: 1855 - protein, 9 aa, Artificial sequence
  synthetic peptide
PYAQPPLGR

SEQ ID NO: 1856 - protein, 9 aa, Artificial sequence
  synthetic peptide
YAQPPLGRL

SEQ ID NO: 1857 - protein, 9 aa, Artificial sequence
  synthetic peptide
AQPPLGRLR

SEQ ID NO: 1858 - protein, 9 aa, Artificial sequence
  synthetic peptide
QPPLGRLRF

SEQ ID NO: 1859 - protein, 9 aa, Artificial sequence
  synthetic peptide
PPLGRLRFK

SEQ ID NO: 1860 - protein, 9 aa, Artificial sequence
  synthetic peptide
PLGRLRFKK

SEQ ID NO: 1861 - protein, 9 aa, Artificial sequence
  synthetic peptide
LGRLRFKKP

SEQ ID NO: 1862 - protein, 9 aa, Artificial sequence
  synthetic peptide
GRLRFKKPQ

SEQ ID NO: 1863 - protein, 9 aa, Artificial sequence
  synthetic peptide
RLRFKKPQS

SEQ ID NO: 1864 - protein, 9 aa, Artificial sequence
  synthetic peptide
LRFKKPQSL

SEQ ID NO: 1865 - protein, 9 aa, Artificial sequence
  synthetic peptide
RFKKPQSLT

SEQ ID NO: 1866 - protein, 9 aa, Artificial sequence
  synthetic peptide
FKKPQSLTK

SEQ ID NO: 1867 - protein, 9 aa, Artificial sequence
  synthetic peptide
KKPQSLTKW

SEQ ID NO: 1868 - protein, 9 aa, Artificial sequence
  synthetic peptide
KPQSLTKWS

SEQ ID NO: 1869 - protein, 9 aa, Artificial sequence
  synthetic peptide
PQSLTKWSD

SEQ ID NO: 1870 - protein, 9 aa, Artificial sequence
  synthetic peptide
QSLTKWSDI

SEQ ID NO: 1871 - protein, 9 aa, Artificial sequence
  synthetic peptide
SLTKWSDIW

SEQ ID NO: 1872 - protein, 9 aa, Artificial sequence
  synthetic peptide
LTKWSDIWN

SEQ ID NO: 1873 - protein, 9 aa, Artificial sequence
  synthetic peptide
TKWSDIWNA

SEQ ID NO: 1874 - protein, 9 aa, Artificial sequence
  synthetic peptide
KWSDIWNAT

SEQ ID NO: 1875 - protein, 9 aa, Artificial sequence
  synthetic peptide
WSDIWNATK

SEQ ID NO: 1876 - protein, 9 aa, Artificial sequence
  synthetic peptide
SDIWNATKY

SEQ ID NO: 1877 - protein, 9 aa, Artificial sequence
  synthetic peptide
DIWNATKYA

SEQ ID NO: 1878 - protein, 9 aa, Artificial sequence
  synthetic peptide
IWNATKYAN

SEQ ID NO: 1879 - protein, 9 aa, Artificial sequence
  synthetic peptide
WNATKYANS

SEQ ID NO: 1880 - protein, 9 aa, Artificial sequence
  synthetic peptide
NATKYANSC

SEQ ID NO: 1881 - protein, 9 aa, Artificial sequence
  synthetic peptide
ATKYANSCC

SEQ ID NO: 1882 - protein, 9 aa, Artificial sequence
  synthetic peptide
TKYANSCCQ

SEQ ID NO: 1883 - protein, 9 aa, Artificial sequence
  synthetic peptide
KYANSCCQN

SEQ ID NO: 1884 - protein, 9 aa, Artificial sequence
  synthetic peptide
YANSCCQNI

SEQ ID NO: 1885 - protein, 9 aa, Artificial sequence
  synthetic peptide
ANSCCQNID

SEQ ID NO: 1886 - protein, 9 aa, Artificial sequence
  synthetic peptide
NSCCQNIDQ

SEQ ID NO: 1887 - protein, 9 aa, Artificial sequence
  synthetic peptide
SCCQNIDQS

SEQ ID NO: 1888 - protein, 9 aa, Artificial sequence
  synthetic peptide
CCQNIDQSF

SEQ ID NO: 1889 - protein, 9 aa, Artificial sequence
  synthetic peptide
CQNIDQSFP

SEQ ID NO: 1890 - protein, 9 aa, Artificial sequence
  synthetic peptide
QNIDQSFPG

SEQ ID NO: 1891 - protein, 9 aa, Artificial sequence
  synthetic peptide
NIDQSFPGF

SEQ ID NO: 1892 - protein, 9 aa, Artificial sequence
  synthetic peptide
IDQSFPGFH

SEQ ID NO: 1893 - protein, 9 aa, Artificial sequence
  synthetic peptide
DQSFPGFHG

SEQ ID NO: 1894 - protein, 9 aa, Artificial sequence
  synthetic peptide
QSFPGFHGS

SEQ ID NO: 1895 - protein, 9 aa, Artificial sequence
  synthetic peptide
SFPGFHGSE

SEQ ID NO: 1896 - protein, 9 aa, Artificial sequence
  synthetic peptide
FPGFHGSEM

SEQ ID NO: 1897 - protein, 9 aa, Artificial sequence
  synthetic peptide
PGFHGSEMW

SEQ ID NO: 1898 - protein, 9 aa, Artificial sequence
  synthetic peptide
GFHGSEMWN

SEQ ID NO: 1899 - protein, 9 aa, Artificial sequence
  synthetic peptide
FHGSEMWNP

SEQ ID NO: 1900 - protein, 9 aa, Artificial sequence
  synthetic peptide
HGSEMWNPN

SEQ ID NO: 1901 - protein, 9 aa, Artificial sequence
  synthetic peptide
GSEMWNPNT

SEQ ID NO: 1902 - protein, 9 aa, Artificial sequence
  synthetic peptide
SEMWNPNTD

SEQ ID NO: 1903 - protein, 9 aa, Artificial sequence
  synthetic peptide
EMWNPNTDL

SEQ ID NO: 1904 - protein, 9 aa, Artificial sequence
  synthetic peptide
MWNPNTDLS

SEQ ID NO: 1905 - protein, 9 aa, Artificial sequence
  synthetic peptide
WNPNTDLSE

SEQ ID NO: 1906 - protein, 9 aa, Artificial sequence
  synthetic peptide
NPNTDLSED

SEQ ID NO: 1907 - protein, 9 aa, Artificial sequence
  synthetic peptide
PNTDLSEDC

SEQ ID NO: 1908 - protein, 9 aa, Artificial sequence
  synthetic peptide
NTDLSEDCL

SEQ ID NO: 1909 - protein, 9 aa, Artificial sequence
  synthetic peptide
TDLSEDCLY

SEQ ID NO: 1910 - protein, 9 aa, Artificial sequence
  synthetic peptide
DLSEDCLYL

SEQ ID NO: 1911 - protein, 9 aa, Artificial sequence
  synthetic peptide
LSEDCLYLN

SEQ ID NO: 1912 - protein, 9 aa, Artificial sequence
  synthetic peptide
SEDCLYLNV

SEQ ID NO: 1913 - protein, 9 aa, Artificial sequence
  synthetic peptide
EDCLYLNVW

SEQ ID NO: 1914 - protein, 9 aa, Artificial sequence
  synthetic peptide
DCLYLNVWI

SEQ ID NO: 1915 - protein, 9 aa, Artificial sequence
  synthetic peptide
CLYLNVWIP

SEQ ID NO: 1916 - protein, 9 aa, Artificial sequence
  synthetic peptide
LYLNVWIPA

SEQ ID NO: 1917 - protein, 9 aa, Artificial sequence
  synthetic peptide
YLNVWIPAP

SEQ ID NO: 1918 - protein, 9 aa, Artificial sequence
  synthetic peptide
LNVWIPAPK

SEQ ID NO: 1919 - protein, 9 aa, Artificial sequence
  synthetic peptide
NVWIPAPKP

SEQ ID NO: 1920 - protein, 9 aa, Artificial sequence
  synthetic peptide
VWIPAPKPK

SEQ ID NO: 1921 - protein, 9 aa, Artificial sequence
  synthetic peptide
WIPAPKPKN

SEQ ID NO: 1922 - protein, 9 aa, Artificial sequence
  synthetic peptide
IPAPKPKNA

SEQ ID NO: 1923 - protein, 9 aa, Artificial sequence
  synthetic peptide
PAPKPKNAT

SEQ ID NO: 1924 - protein, 9 aa, Artificial sequence
  synthetic peptide
APKPKNATV

SEQ ID NO: 1925 - protein, 9 aa, Artificial sequence
  synthetic peptide
PKPKNATVL

SEQ ID NO: 1926 - protein, 9 aa, Artificial sequence
  synthetic peptide
KPKNATVLI

SEQ ID NO: 1927 - protein, 9 aa, Artificial sequence
  synthetic peptide
PKNATVLIW

SEQ ID NO: 1928 - protein, 9 aa, Artificial sequence
  synthetic peptide
KNATVLIWI

SEQ ID NO: 1929 - protein, 9 aa, Artificial sequence
  synthetic peptide
NATVLIWIY

SEQ ID NO: 1930 - protein, 9 aa, Artificial sequence
  synthetic peptide
ATVLIWIYG

SEQ ID NO: 1931 - protein, 9 aa, Artificial sequence
  synthetic peptide
TVLIWIYGG

SEQ ID NO: 1932 - protein, 9 aa, Artificial sequence
  synthetic peptide
VLIWIYGGG

SEQ ID NO: 1933 - protein, 9 aa, Artificial sequence
  synthetic peptide
LIWIYGGGF

SEQ ID NO: 1934 - protein, 9 aa, Artificial sequence
  synthetic peptide
IWIYGGGFQ

SEQ ID NO: 1935 - protein, 9 aa, Artificial sequence
  synthetic peptide
WIYGGGFQT

SEQ ID NO: 1936 - protein, 9 aa, Artificial sequence
  synthetic peptide
IYGGGFQTG

SEQ ID NO: 1937 - protein, 9 aa, Artificial sequence
  synthetic peptide
YGGGFQTGT

SEQ ID NO: 1938 - protein, 9 aa, Artificial sequence
  synthetic peptide
GGGFQTGTS

SEQ ID NO: 1939 - protein, 9 aa, Artificial sequence
  synthetic peptide
GGFQTGTSS

SEQ ID NO: 1940 - protein, 9 aa, Artificial sequence
  synthetic peptide
GFQTGTSSL

SEQ ID NO: 1941 - protein, 9 aa, Artificial sequence
  synthetic peptide
FQTGTSSLH

SEQ ID NO: 1942 - protein, 9 aa, Artificial sequence
  synthetic peptide
QTGTSSLHV

SEQ ID NO: 1943 - protein, 9 aa, Artificial sequence
  synthetic peptide
TGTSSLHVY

SEQ ID NO: 1944 - protein, 9 aa, Artificial sequence
  synthetic peptide
GTSSLHVYD

SEQ ID NO: 1945 - protein, 9 aa, Artificial sequence
  synthetic peptide
TSSLHVYDG

SEQ ID NO: 1946 - protein, 9 aa, Artificial sequence
  synthetic peptide
SSLHVYDGK

SEQ ID NO: 1947 - protein, 9 aa, Artificial sequence
  synthetic peptide
SLHVYDGKF

SEQ ID NO: 1948 - protein, 9 aa, Artificial sequence
  synthetic peptide
LHVYDGKFL

SEQ ID NO: 1949 - protein, 9 aa, Artificial sequence
  synthetic peptide
HVYDGKFLA

SEQ ID NO: 1950 - protein, 9 aa, Artificial sequence
  synthetic peptide
VYDGKFLAR

SEQ ID NO: 1951 - protein, 9 aa, Artificial sequence
  synthetic peptide
YDGKFLARV

SEQ ID NO: 1952 - protein, 9 aa, Artificial sequence
  synthetic peptide
DGKFLARVE

SEQ ID NO: 1953 - protein, 9 aa, Artificial sequence
  synthetic peptide
GKFLARVER

SEQ ID NO: 1954 - protein, 9 aa, Artificial sequence
  synthetic peptide
KFLARVERV

SEQ ID NO: 1955 - protein, 9 aa, Artificial sequence
  synthetic peptide
FLARVERVI

SEQ ID NO: 1956 - protein, 9 aa, Artificial sequence
  synthetic peptide
LARVERVIV

SEQ ID NO: 1957 - protein, 9 aa, Artificial sequence
  synthetic peptide
ARVERVIVV

SEQ ID NO: 1958 - protein, 9 aa, Artificial sequence
  synthetic peptide
RVERVIVVS

SEQ ID NO: 1959 - protein, 9 aa, Artificial sequence
  synthetic peptide
VERVIVVSM

SEQ ID NO: 1960 - protein, 9 aa, Artificial sequence
  synthetic peptide
ERVIVVSMN

SEQ ID NO: 1961 - protein, 9 aa, Artificial sequence
  synthetic peptide
RVIVVSMNY

SEQ ID NO: 1962 - protein, 9 aa, Artificial sequence
  synthetic peptide
VIVVSMNYR

SEQ ID NO: 1963 - protein, 9 aa, Artificial sequence
  synthetic peptide
IVVSMNYRV

SEQ ID NO: 1964 - protein, 9 aa, Artificial sequence
  synthetic peptide
VVSMNYRVG

SEQ ID NO: 1965 - protein, 9 aa, Artificial sequence
  synthetic peptide
VSMNYRVGA

SEQ ID NO: 1966 - protein, 9 aa, Artificial sequence
  synthetic peptide
SMNYRVGAL

SEQ ID NO: 1967 - protein, 9 aa, Artificial sequence
  synthetic peptide
MNYRVGALG

SEQ ID NO: 1968 - protein, 9 aa, Artificial sequence
  synthetic peptide
NYRVGALGF

SEQ ID NO: 1969 - protein, 9 aa, Artificial sequence
  synthetic peptide
YRVGALGFL

SEQ ID NO: 1970 - protein, 9 aa, Artificial sequence
  synthetic peptide
RVGALGFLA

SEQ ID NO: 1971 - protein, 9 aa, Artificial sequence
  synthetic peptide
VGALGFLAL

SEQ ID NO: 1972 - protein, 9 aa, Artificial sequence
  synthetic peptide
GALGFLALP

SEQ ID NO: 1973 - protein, 9 aa, Artificial sequence
  synthetic peptide
ALGFLALPG

SEQ ID NO: 1974 - protein, 9 aa, Artificial sequence
  synthetic peptide
LGFLALPGN

SEQ ID NO: 1975 - protein, 9 aa, Artificial sequence
  synthetic peptide
GFLALPGNP

SEQ ID NO: 1976 - protein, 9 aa, Artificial sequence
  synthetic peptide
FLALPGNPE

SEQ ID NO: 1977 - protein, 9 aa, Artificial sequence
  synthetic peptide
LALPGNPEA

SEQ ID NO: 1978 - protein, 9 aa, Artificial sequence
  synthetic peptide
ALPGNPEAP

SEQ ID NO: 1979 - protein, 9 aa, Artificial sequence
  synthetic peptide
LPGNPEAPG

SEQ ID NO: 1980 - protein, 9 aa, Artificial sequence
  synthetic peptide
PGNPEAPGN

SEQ ID NO: 1981 - protein, 9 aa, Artificial sequence
  synthetic peptide
GNPEAPGNM

SEQ ID NO: 1982 - protein, 9 aa, Artificial sequence
  synthetic peptide
NPEAPGNMG

SEQ ID NO: 1983 - protein, 9 aa, Artificial sequence
  synthetic peptide
PEAPGNMGL

SEQ ID NO: 1984 - protein, 9 aa, Artificial sequence
  synthetic peptide
EAPGNMGLF

SEQ ID NO: 1985 - protein, 9 aa, Artificial sequence
  synthetic peptide
APGNMGLFD

SEQ ID NO: 1986 - protein, 9 aa, Artificial sequence
  synthetic peptide
PGNMGLFDQ

SEQ ID NO: 1987 - protein, 9 aa, Artificial sequence
  synthetic peptide
GNMGLFDQQ

SEQ ID NO: 1988 - protein, 9 aa, Artificial sequence
  synthetic peptide
NMGLFDQQL

SEQ ID NO: 1989 - protein, 9 aa, Artificial sequence
  synthetic peptide
MGLFDQQLA

SEQ ID NO: 1990 - protein, 9 aa, Artificial sequence
  synthetic peptide
GLFDQQLAL

SEQ ID NO: 1991 - protein, 9 aa, Artificial sequence
  synthetic peptide
LFDQQLALQ

SEQ ID NO: 1992 - protein, 9 aa, Artificial sequence
  synthetic peptide
FDQQLALQW

SEQ ID NO: 1993 - protein, 9 aa, Artificial sequence
  synthetic peptide
DQQLALQWV

SEQ ID NO: 1994 - protein, 9 aa, Artificial sequence
  synthetic peptide
QQLALQWVQ

SEQ ID NO: 1995 - protein, 9 aa, Artificial sequence
  synthetic peptide
QLALQWVQK

SEQ ID NO: 1996 - protein, 9 aa, Artificial sequence
  synthetic peptide
LALQWVQKN

SEQ ID NO: 1997 - protein, 9 aa, Artificial sequence
  synthetic peptide
ALQWVQKNI

SEQ ID NO: 1998 - protein, 9 aa, Artificial sequence
  synthetic peptide
LQWVQKNIA

SEQ ID NO: 1999 - protein, 9 aa, Artificial sequence
  synthetic peptide
QWVQKNIAA

SEQ ID NO: 2000 - protein, 9 aa, Artificial sequence
  synthetic peptide
WVQKNIAAF

SEQ ID NO: 2001 - protein, 9 aa, Artificial sequence
  synthetic peptide
VQKNIAAFG

SEQ ID NO: 2002 - protein, 9 aa, Artificial sequence
  synthetic peptide
QKNIAAFGG

SEQ ID NO: 2003 - protein, 9 aa, Artificial sequence
  synthetic peptide
KNIAAFGGN

SEQ ID NO: 2004 - protein, 9 aa, Artificial sequence
  synthetic peptide
NIAAFGGNP

SEQ ID NO: 2005 - protein, 9 aa, Artificial sequence
  synthetic peptide
IAAFGGNPK

SEQ ID NO: 2006 - protein, 9 aa, Artificial sequence
  synthetic peptide
AAFGGNPKS

SEQ ID NO: 2007 - protein, 9 aa, Artificial sequence
  synthetic peptide
AFGGNPKSV

SEQ ID NO: 2008 - protein, 9 aa, Artificial sequence
  synthetic peptide
FGGNPKSVT

SEQ ID NO: 2009 - protein, 9 aa, Artificial sequence
  synthetic peptide
GGNPKSVTL

SEQ ID NO: 2010 - protein, 9 aa, Artificial sequence
  synthetic peptide
GNPKSVTLF

SEQ ID NO: 2011 - protein, 9 aa, Artificial sequence
  synthetic peptide
NPKSVTLFG

SEQ ID NO: 2012 - protein, 9 aa, Artificial sequence
  synthetic peptide
PKSVTLFGE

SEQ ID NO: 2013 - protein, 9 aa, Artificial sequence
  synthetic peptide
KSVTLFGES

SEQ ID NO: 2014 - protein, 9 aa, Artificial sequence
  synthetic peptide
SVTLFGESA

SEQ ID NO: 2015 - protein, 9 aa, Artificial sequence
  synthetic peptide
VTLFGESAG

SEQ ID NO: 2016 - protein, 9 aa, Artificial sequence
  synthetic peptide
TLFGESAGA

SEQ ID NO: 2017 - protein, 9 aa, Artificial sequence
  synthetic peptide
LFGESAGAA

SEQ ID NO: 2018 - protein, 9 aa, Artificial sequence
  synthetic peptide
FGESAGAAS

SEQ ID NO: 2019 - protein, 9 aa, Artificial sequence
  synthetic peptide
GESAGAASV

SEQ ID NO: 2020 - protein, 9 aa, Artificial sequence
  synthetic peptide
ESAGAASVS

SEQ ID NO: 2021 - protein, 9 aa, Artificial sequence
  synthetic peptide
SAGAASVSL

SEQ ID NO: 2022 - protein, 9 aa, Artificial sequence
  synthetic peptide
AGAASVSLH

SEQ ID NO: 2023 - protein, 9 aa, Artificial sequence
  synthetic peptide
GAASVSLHL

SEQ ID NO: 2024 - protein, 9 aa, Artificial sequence
  synthetic peptide
AASVSLHLL

SEQ ID NO: 2025 - protein, 9 aa, Artificial sequence
  synthetic peptide
ASVSLHLLS

SEQ ID NO: 2026 - protein, 9 aa, Artificial sequence
  synthetic peptide
SVSLHLLSP

SEQ ID NO: 2027 - protein, 9 aa, Artificial sequence
  synthetic peptide
VSLHLLSPG

SEQ ID NO: 2028 - protein, 9 aa, Artificial sequence
  synthetic peptide
SLHLLSPGS

SEQ ID NO: 2029 - protein, 9 aa, Artificial sequence
  synthetic peptide
LHLLSPGSH

SEQ ID NO: 2030 - protein, 9 aa, Artificial sequence
  synthetic peptide
HLLSPGSHS

SEQ ID NO: 2031 - protein, 9 aa, Artificial sequence
  synthetic peptide
LLSPGSHSL

SEQ ID NO: 2032 - protein, 9 aa, Artificial sequence
  synthetic peptide
LSPGSHSLF

SEQ ID NO: 2033 - protein, 9 aa, Artificial sequence
  synthetic peptide
SPGSHSLFT

SEQ ID NO: 2034 - protein, 9 aa, Artificial sequence
  synthetic peptide
PGSHSLFTR

SEQ ID NO: 2035 - protein, 9 aa, Artificial sequence
  synthetic peptide
GSHSLFTRA

SEQ ID NO: 2036 - protein, 9 aa, Artificial sequence
  synthetic peptide
SHSLFTRAI

SEQ ID NO: 2037 - protein, 9 aa, Artificial sequence
  synthetic peptide
HSLFTRAIL

SEQ ID NO: 2038 - protein, 9 aa, Artificial sequence
  synthetic peptide
SLFTRAILQ

SEQ ID NO: 2039 - protein, 9 aa, Artificial sequence
  synthetic peptide
LFTRAILQS

SEQ ID NO: 2040 - protein, 9 aa, Artificial sequence
  synthetic peptide
FTRAILQSG

SEQ ID NO: 2041 - protein, 9 aa, Artificial sequence
  synthetic peptide
TRAILQSGS

SEQ ID NO: 2042 - protein, 9 aa, Artificial sequence
  synthetic peptide
RAILQSGSF

SEQ ID NO: 2043 - protein, 9 aa, Artificial sequence
  synthetic peptide
AILQSGSFN

SEQ ID NO: 2044 - protein, 9 aa, Artificial sequence
  synthetic peptide
ILQSGSFNA

SEQ ID NO: 2045 - protein, 9 aa, Artificial sequence
  synthetic peptide
LQSGSFNAP

SEQ ID NO: 2046 - protein, 9 aa, Artificial sequence
  synthetic peptide
QSGSFNAPW

SEQ ID NO: 2047 - protein, 9 aa, Artificial sequence
  synthetic peptide
SGSFNAPWA

SEQ ID NO: 2048 - protein, 9 aa, Artificial sequence
  synthetic peptide
GSFNAPWAV

SEQ ID NO: 2049 - protein, 9 aa, Artificial sequence
  synthetic peptide
SFNAPWAVT

SEQ ID NO: 2050 - protein, 9 aa, Artificial sequence
  synthetic peptide
FNAPWAVTS

SEQ ID NO: 2051 - protein, 9 aa, Artificial sequence
  synthetic peptide
NAPWAVTSL

SEQ ID NO: 2052 - protein, 9 aa, Artificial sequence
  synthetic peptide
APWAVTSLY

SEQ ID NO: 2053 - protein, 9 aa, Artificial sequence
  synthetic peptide
PWAVTSLYE

SEQ ID NO: 2054 - protein, 9 aa, Artificial sequence
  synthetic peptide
WAVTSLYEA

SEQ ID NO: 2055 - protein, 9 aa, Artificial sequence
  synthetic peptide
AVTSLYEAR

SEQ ID NO: 2056 - protein, 9 aa, Artificial sequence
  synthetic peptide
VTSLYEARN

SEQ ID NO: 2057 - protein, 9 aa, Artificial sequence
  synthetic peptide
TSLYEARNR

SEQ ID NO: 2058 - protein, 9 aa, Artificial sequence
  synthetic peptide
SLYEARNRT

SEQ ID NO: 2059 - protein, 9 aa, Artificial sequence
  synthetic peptide
LYEARNRTL

SEQ ID NO: 2060 - protein, 9 aa, Artificial sequence
  synthetic peptide
YEARNRTLN

SEQ ID NO: 2061 - protein, 9 aa, Artificial sequence
  synthetic peptide
EARNRTLNL

SEQ ID NO: 2062 - protein, 9 aa, Artificial sequence
  synthetic peptide
ARNRTLNLA

SEQ ID NO: 2063 - protein, 9 aa, Artificial sequence
  synthetic peptide
RNRTLNLAK

SEQ ID NO: 2064 - protein, 9 aa, Artificial sequence
  synthetic peptide
NRTLNLAKL

SEQ ID NO: 2065 - protein, 9 aa, Artificial sequence
  synthetic peptide
RTLNLAKLT

SEQ ID NO: 2066 - protein, 9 aa, Artificial sequence
  synthetic peptide
TLNLAKLTG

SEQ ID NO: 2067 - protein, 9 aa, Artificial sequence
  synthetic peptide
LNLAKLTGC

SEQ ID NO: 2068 - protein, 9 aa, Artificial sequence
  synthetic peptide
NLAKLTGCS

SEQ ID NO: 2069 - protein, 9 aa, Artificial sequence
  synthetic peptide
LAKLTGCSR

SEQ ID NO: 2070 - protein, 9 aa, Artificial sequence
  synthetic peptide
AKLTGCSRE

SEQ ID NO: 2071 - protein, 9 aa, Artificial sequence
  synthetic peptide
KLTGCSREN

SEQ ID NO: 2072 - protein, 9 aa, Artificial sequence
  synthetic peptide
LTGCSRENE

SEQ ID NO: 2073 - protein, 9 aa, Artificial sequence
  synthetic peptide
TGCSRENET

SEQ ID NO: 2074 - protein, 9 aa, Artificial sequence
  synthetic peptide
GCSRENETE

SEQ ID NO: 2075 - protein, 9 aa, Artificial sequence
  synthetic peptide
CSRENETEI

SEQ ID NO: 2076 - protein, 9 aa, Artificial sequence
  synthetic peptide
SRENETEII

SEQ ID NO: 2077 - protein, 9 aa, Artificial sequence
  synthetic peptide
RENETEIIK

SEQ ID NO: 2078 - protein, 9 aa, Artificial sequence
  synthetic peptide
ENETEIIKC

SEQ ID NO: 2079 - protein, 9 aa, Artificial sequence
  synthetic peptide
NETEIIKCL

SEQ ID NO: 2080 - protein, 9 aa, Artificial sequence
  synthetic peptide
ETEIIKCLR

SEQ ID NO: 2081 - protein, 9 aa, Artificial sequence
  synthetic peptide
TEIIKCLRN

SEQ ID NO: 2082 - protein, 9 aa, Artificial sequence
  synthetic peptide
EIIKCLRNK

SEQ ID NO: 2083 - protein, 9 aa, Artificial sequence
  synthetic peptide
IIKCLRNKD

SEQ ID NO: 2084 - protein, 9 aa, Artificial sequence
  synthetic peptide
IKCLRNKDP

SEQ ID NO: 2085 - protein, 9 aa, Artificial sequence
  synthetic peptide
KCLRNKDPQ

SEQ ID NO: 2086 - protein, 9 aa, Artificial sequence
  synthetic peptide
CLRNKDPQE

SEQ ID NO: 2087 - protein, 9 aa, Artificial sequence
  synthetic peptide
LRNKDPQEI

SEQ ID NO: 2088 - protein, 9 aa, Artificial sequence
  synthetic peptide
RNKDPQEIL

SEQ ID NO: 2089 - protein, 9 aa, Artificial sequence
  synthetic peptide
NKDPQEILL

SEQ ID NO: 2090 - protein, 9 aa, Artificial sequence
  synthetic peptide
KDPQEILLN

SEQ ID NO: 2091 - protein, 9 aa, Artificial sequence
  synthetic peptide
DPQEILLNE

SEQ ID NO: 2092 - protein, 9 aa, Artificial sequence
  synthetic peptide
PQEILLNEA

SEQ ID NO: 2093 - protein, 9 aa, Artificial sequence
  synthetic peptide
QEILLNEAF

SEQ ID NO: 2094 - protein, 9 aa, Artificial sequence
  synthetic peptide
EILLNEAFV

SEQ ID NO: 2095 - protein, 9 aa, Artificial sequence
  synthetic peptide
ILLNEAFVV

SEQ ID NO: 2096 - protein, 9 aa, Artificial sequence
  synthetic peptide
LLNEAFVVP

SEQ ID NO: 2097 - protein, 9 aa, Artificial sequence
  synthetic peptide
LNEAFVVPY

SEQ ID NO: 2098 - protein, 9 aa, Artificial sequence
  synthetic peptide
NEAFVVPYG

SEQ ID NO: 2099 - protein, 9 aa, Artificial sequence
  synthetic peptide
EAFVVPYGT

SEQ ID NO: 2100 - protein, 9 aa, Artificial sequence
  synthetic peptide
AFVVPYGTP

SEQ ID NO: 2101 - protein, 9 aa, Artificial sequence
  synthetic peptide
FVVPYGTPL

SEQ ID NO: 2102 - protein, 9 aa, Artificial sequence
  synthetic peptide
VVPYGTPLS

SEQ ID NO: 2103 - protein, 9 aa, Artificial sequence
  synthetic peptide
VPYGTPLSV

SEQ ID NO: 2104 - protein, 9 aa, Artificial sequence
  synthetic peptide
PYGTPLSVN

SEQ ID NO: 2105 - protein, 9 aa, Artificial sequence
  synthetic peptide
YGTPLSVNF

SEQ ID NO: 2106 - protein, 9 aa, Artificial sequence
  synthetic peptide
GTPLSVNFG

SEQ ID NO: 2107 - protein, 9 aa, Artificial sequence
  synthetic peptide
TPLSVNFGP

SEQ ID NO: 2108 - protein, 9 aa, Artificial sequence
  synthetic peptide
PLSVNFGPT

SEQ ID NO: 2109 - protein, 9 aa, Artificial sequence
  synthetic peptide
LSVNFGPTV

SEQ ID NO: 2110 - protein, 9 aa, Artificial sequence
  synthetic peptide
SVNFGPTVD

SEQ ID NO: 2111 - protein, 9 aa, Artificial sequence
  synthetic peptide
VNFGPTVDG

SEQ ID NO: 2112 - protein, 9 aa, Artificial sequence
  synthetic peptide
NFGPTVDGD

SEQ ID NO: 2113 - protein, 9 aa, Artificial sequence
  synthetic peptide
FGPTVDGDF

SEQ ID NO: 2114 - protein, 9 aa, Artificial sequence
  synthetic peptide
GPTVDGDFL

SEQ ID NO: 2115 - protein, 9 aa, Artificial sequence
  synthetic peptide
PTVDGDFLT

SEQ ID NO: 2116 - protein, 9 aa, Artificial sequence
  synthetic peptide
TVDGDFLTD

SEQ ID NO: 2117 - protein, 9 aa, Artificial sequence
  synthetic peptide
VDGDFLTDM

SEQ ID NO: 2118 - protein, 9 aa, Artificial sequence
  synthetic peptide
DGDFLTDMP

SEQ ID NO: 2119 - protein, 9 aa, Artificial sequence
  synthetic peptide
GDFLTDMPD

SEQ ID NO: 2120 - protein, 9 aa, Artificial sequence
  synthetic peptide
DFLTDMPDI

SEQ ID NO: 2121 - protein, 9 aa, Artificial sequence
  synthetic peptide
FLTDMPDIL

SEQ ID NO: 2122 - protein, 9 aa, Artificial sequence
  synthetic peptide
LTDMPDILL

SEQ ID NO: 2123 - protein, 9 aa, Artificial sequence
  synthetic peptide
TDMPDILLE

SEQ ID NO: 2124 - protein, 9 aa, Artificial sequence
  synthetic peptide
DMPDILLEL

SEQ ID NO: 2125 - protein, 9 aa, Artificial sequence
  synthetic peptide
MPDILLELG

SEQ ID NO: 2126 - protein, 9 aa, Artificial sequence
  synthetic peptide
PDILLELGQ

SEQ ID NO: 2127 - protein, 9 aa, Artificial sequence
  synthetic peptide
DILLELGQF

SEQ ID NO: 2128 - protein, 9 aa, Artificial sequence
  synthetic peptide
ILLELGQFK

SEQ ID NO: 2129 - protein, 9 aa, Artificial sequence
  synthetic peptide
LLELGQFKK

SEQ ID NO: 2130 - protein, 9 aa, Artificial sequence
  synthetic peptide
LELGQFKKT

SEQ ID NO: 2131 - protein, 9 aa, Artificial sequence
  synthetic peptide
ELGQFKKTQ

SEQ ID NO: 2132 - protein, 9 aa, Artificial sequence
  synthetic peptide
LGQFKKTQI

SEQ ID NO: 2133 - protein, 9 aa, Artificial sequence
  synthetic peptide
GQFKKTQIL

SEQ ID NO: 2134 - protein, 9 aa, Artificial sequence
  synthetic peptide
QFKKTQILV

SEQ ID NO: 2135 - protein, 9 aa, Artificial sequence
  synthetic peptide
FKKTQILVG

SEQ ID NO: 2136 - protein, 9 aa, Artificial sequence
  synthetic peptide
KKTQILVGV

SEQ ID NO: 2137 - protein, 9 aa, Artificial sequence
  synthetic peptide
KTQILVGVN

SEQ ID NO: 2138 - protein, 9 aa, Artificial sequence
  synthetic peptide
TQILVGVNK

SEQ ID NO: 2139 - protein, 9 aa, Artificial sequence
  synthetic peptide
QILVGVNKD

SEQ ID NO: 2140 - protein, 9 aa, Artificial sequence
  synthetic peptide
ILVGVNKDE

SEQ ID NO: 2141 - protein, 9 aa, Artificial sequence
  synthetic peptide
LVGVNKDEG

SEQ ID NO: 2142 - protein, 9 aa, Artificial sequence
  synthetic peptide
VGVNKDEGT

SEQ ID NO: 2143 - protein, 9 aa, Artificial sequence
  synthetic peptide
GVNKDEGTA

SEQ ID NO: 2144 - protein, 9 aa, Artificial sequence
  synthetic peptide
VNKDEGTAF

SEQ ID NO: 2145 - protein, 9 aa, Artificial sequence
  synthetic peptide
NKDEGTAFL

SEQ ID NO: 2146 - protein, 9 aa, Artificial sequence
  synthetic peptide
KDEGTAFLV

SEQ ID NO: 2147 - protein, 9 aa, Artificial sequence
  synthetic peptide
DEGTAFLVY

SEQ ID NO: 2148 - protein, 9 aa, Artificial sequence
  synthetic peptide
EGTAFLVYG

SEQ ID NO: 2149 - protein, 9 aa, Artificial sequence
  synthetic peptide
GTAFLVYGA

SEQ ID NO: 2150 - protein, 9 aa, Artificial sequence
  synthetic peptide
TAFLVYGAP

SEQ ID NO: 2151 - protein, 9 aa, Artificial sequence
  synthetic peptide
AFLVYGAPG

SEQ ID NO: 2152 - protein, 9 aa, Artificial sequence
  synthetic peptide
FLVYGAPGF

SEQ ID NO: 2153 - protein, 9 aa, Artificial sequence
  synthetic peptide
LVYGAPGFS

SEQ ID NO: 2154 - protein, 9 aa, Artificial sequence
  synthetic peptide
VYGAPGFSK

SEQ ID NO: 2155 - protein, 9 aa, Artificial sequence
  synthetic peptide
YGAPGFSKD

SEQ ID NO: 2156 - protein, 9 aa, Artificial sequence
  synthetic peptide
GAPGFSKDN

SEQ ID NO: 2157 - protein, 9 aa, Artificial sequence
  synthetic peptide
APGFSKDNN

SEQ ID NO: 2158 - protein, 9 aa, Artificial sequence
  synthetic peptide
PGFSKDNNS

SEQ ID NO: 2159 - protein, 9 aa, Artificial sequence
  synthetic peptide
GFSKDNNSI

SEQ ID NO: 2160 - protein, 9 aa, Artificial sequence
  synthetic peptide
FSKDNNSII

SEQ ID NO: 2161 - protein, 9 aa, Artificial sequence
  synthetic peptide
SKDNNSIIT

SEQ ID NO: 2162 - protein, 9 aa, Artificial sequence
  synthetic peptide
KDNNSIITR

SEQ ID NO: 2163 - protein, 9 aa, Artificial sequence
  synthetic peptide
DNNSIITRK

SEQ ID NO: 2164 - protein, 9 aa, Artificial sequence
  synthetic peptide
NNSIITRKE

SEQ ID NO: 2165 - protein, 9 aa, Artificial sequence
  synthetic peptide
NSIITRKEF

SEQ ID NO: 2166 - protein, 9 aa, Artificial sequence
  synthetic peptide
SIITRKEFQ

SEQ ID NO: 2167 - protein, 9 aa, Artificial sequence
  synthetic peptide
IITRKEFQE

SEQ ID NO: 2168 - protein, 9 aa, Artificial sequence
  synthetic peptide
ITRKEFQEG

SEQ ID NO: 2169 - protein, 9 aa, Artificial sequence
  synthetic peptide
TRKEFQEGL

SEQ ID NO: 2170 - protein, 9 aa, Artificial sequence
  synthetic peptide
RKEFQEGLK

SEQ ID NO: 2171 - protein, 9 aa, Artificial sequence
  synthetic peptide
KEFQEGLKI

SEQ ID NO: 2172 - protein, 9 aa, Artificial sequence
  synthetic peptide
EFQEGLKIF

SEQ ID NO: 2173 - protein, 9 aa, Artificial sequence
  synthetic peptide
FQEGLKIFF

SEQ ID NO: 2174 - protein, 9 aa, Artificial sequence
  synthetic peptide
QEGLKIFFP

SEQ ID NO: 2175 - protein, 9 aa, Artificial sequence
  synthetic peptide
EGLKIFFPG

SEQ ID NO: 2176 - protein, 9 aa, Artificial sequence
  synthetic peptide
GLKIFFPGV

SEQ ID NO: 2177 - protein, 9 aa, Artificial sequence
  synthetic peptide
LKIFFPGVS

SEQ ID NO: 2178 - protein, 9 aa, Artificial sequence
  synthetic peptide
KIFFPGVSE

SEQ ID NO: 2179 - protein, 9 aa, Artificial sequence
  synthetic peptide
IFFPGVSEF

SEQ ID NO: 2180 - protein, 9 aa, Artificial sequence
  synthetic peptide
FFPGVSEFG

SEQ ID NO: 2181 - protein, 9 aa, Artificial sequence
  synthetic peptide
FPGVSEFGK

SEQ ID NO: 2182 - protein, 9 aa, Artificial sequence
  synthetic peptide
PGVSEFGKE

SEQ ID NO: 2183 - protein, 9 aa, Artificial sequence
  synthetic peptide
GVSEFGKES

SEQ ID NO: 2184 - protein, 9 aa, Artificial sequence
  synthetic peptide
VSEFGKESI

SEQ ID NO: 2185 - protein, 9 aa, Artificial sequence
  synthetic peptide
SEFGKESIL

SEQ ID NO: 2186 - protein, 9 aa, Artificial sequence
  synthetic peptide
EFGKESILF

SEQ ID NO: 2187 - protein, 9 aa, Artificial sequence
  synthetic peptide
FGKESILFH

SEQ ID NO: 2188 - protein, 9 aa, Artificial sequence
  synthetic peptide
GKESILFHY

SEQ ID NO: 2189 - protein, 9 aa, Artificial sequence
  synthetic peptide
KESILFHYT

SEQ ID NO: 2190 - protein, 9 aa, Artificial sequence
  synthetic peptide
ESILFHYTD

SEQ ID NO: 2191 - protein, 9 aa, Artificial sequence
  synthetic peptide
SILFHYTDW

SEQ ID NO: 2192 - protein, 9 aa, Artificial sequence
  synthetic peptide
ILFHYTDWV

SEQ ID NO: 2193 - protein, 9 aa, Artificial sequence
  synthetic peptide
LFHYTDWVD

SEQ ID NO: 2194 - protein, 9 aa, Artificial sequence
  synthetic peptide
FHYTDWVDD

SEQ ID NO: 2195 - protein, 9 aa, Artificial sequence
  synthetic peptide
HYTDWVDDQ

SEQ ID NO: 2196 - protein, 9 aa, Artificial sequence
  synthetic peptide
YTDWVDDQR

SEQ ID NO: 2197 - protein, 9 aa, Artificial sequence
  synthetic peptide
TDWVDDQRP

SEQ ID NO: 2198 - protein, 9 aa, Artificial sequence
  synthetic peptide
DWVDDQRPE

SEQ ID NO: 2199 - protein, 9 aa, Artificial sequence
  synthetic peptide
WVDDQRPEN

SEQ ID NO: 2200 - protein, 9 aa, Artificial sequence
  synthetic peptide
VDDQRPENY

SEQ ID NO: 2201 - protein, 9 aa, Artificial sequence
  synthetic peptide
DDQRPENYR

SEQ ID NO: 2202 - protein, 9 aa, Artificial sequence
  synthetic peptide
DQRPENYRE

SEQ ID NO: 2203 - protein, 9 aa, Artificial sequence
  synthetic peptide
QRPENYREA

SEQ ID NO: 2204 - protein, 9 aa, Artificial sequence
  synthetic peptide
RPENYREAL

SEQ ID NO: 2205 - protein, 9 aa, Artificial sequence
  synthetic peptide
PENYREALG

SEQ ID NO: 2206 - protein, 9 aa, Artificial sequence
  synthetic peptide
ENYREALGD

SEQ ID NO: 2207 - protein, 9 aa, Artificial sequence
  synthetic peptide
NYREALGDV

SEQ ID NO: 2208 - protein, 9 aa, Artificial sequence
  synthetic peptide
YREALGDVV

SEQ ID NO: 2209 - protein, 9 aa, Artificial sequence
  synthetic peptide
REALGDVVG

SEQ ID NO: 2210 - protein, 9 aa, Artificial sequence
  synthetic peptide
EALGDVVGD

SEQ ID NO: 2211 - protein, 9 aa, Artificial sequence
  synthetic peptide
ALGDVVGDY

SEQ ID NO: 2212 - protein, 9 aa, Artificial sequence
  synthetic peptide
LGDVVGDYN

SEQ ID NO: 2213 - protein, 9 aa, Artificial sequence
  synthetic peptide
GDVVGDYNF

SEQ ID NO: 2214 - protein, 9 aa, Artificial sequence
  synthetic peptide
DVVGDYNFI

SEQ ID NO: 2215 - protein, 9 aa, Artificial sequence
  synthetic peptide
VVGDYNFIC

SEQ ID NO: 2216 - protein, 9 aa, Artificial sequence
  synthetic peptide
VGDYNFICP

SEQ ID NO: 2217 - protein, 9 aa, Artificial sequence
  synthetic peptide
GDYNFICPA

SEQ ID NO: 2218 - protein, 9 aa, Artificial sequence
  synthetic peptide
DYNFICPAL

SEQ ID NO: 2219 - protein, 9 aa, Artificial sequence
  synthetic peptide
YNFICPALE

SEQ ID NO: 2220 - protein, 9 aa, Artificial sequence
  synthetic peptide
NFICPALEF

SEQ ID NO: 2221 - protein, 9 aa, Artificial sequence
  synthetic peptide
FICPALEFT

SEQ ID NO: 2222 - protein, 9 aa, Artificial sequence
  synthetic peptide
ICPALEFTK

SEQ ID NO: 2223 - protein, 9 aa, Artificial sequence
  synthetic peptide
CPALEFTKK

SEQ ID NO: 2224 - protein, 9 aa, Artificial sequence
  synthetic peptide
PALEFTKKF

SEQ ID NO: 2225 - protein, 9 aa, Artificial sequence
  synthetic peptide
ALEFTKKFS

SEQ ID NO: 2226 - protein, 9 aa, Artificial sequence
  synthetic peptide
LEFTKKFSE

SEQ ID NO: 2227 - protein, 9 aa, Artificial sequence
  synthetic peptide
EFTKKFSEW

SEQ ID NO: 2228 - protein, 9 aa, Artificial sequence
  synthetic peptide
FTKKFSEWG

SEQ ID NO: 2229 - protein, 9 aa, Artificial sequence
  synthetic peptide
TKKFSEWGN

SEQ ID NO: 2230 - protein, 9 aa, Artificial sequence
  synthetic peptide
KKFSEWGNN

SEQ ID NO: 2231 - protein, 9 aa, Artificial sequence
  synthetic peptide
KFSEWGNNA

SEQ ID NO: 2232 - protein, 9 aa, Artificial sequence
  synthetic peptide
FSEWGNNAF

SEQ ID NO: 2233 - protein, 9 aa, Artificial sequence
  synthetic peptide
SEWGNNAFF

SEQ ID NO: 2234 - protein, 9 aa, Artificial sequence
  synthetic peptide
EWGNNAFFY

SEQ ID NO: 2235 - protein, 9 aa, Artificial sequence
  synthetic peptide
WGNNAFFYY

SEQ ID NO: 2236 - protein, 9 aa, Artificial sequence
  synthetic peptide
GNNAFFYYF

SEQ ID NO: 2237 - protein, 9 aa, Artificial sequence
  synthetic peptide
NNAFFYYFE

SEQ ID NO: 2238 - protein, 9 aa, Artificial sequence
  synthetic peptide
NAFFYYFEH

SEQ ID NO: 2239 - protein, 9 aa, Artificial sequence
  synthetic peptide
AFFYYFEHR

SEQ ID NO: 2240 - protein, 9 aa, Artificial sequence
  synthetic peptide
FFYYFEHRS

SEQ ID NO: 2241 - protein, 9 aa, Artificial sequence
  synthetic peptide
FYYFEHRSS

SEQ ID NO: 2242 - protein, 9 aa, Artificial sequence
  synthetic peptide
YYFEHRSSK

SEQ ID NO: 2243 - protein, 9 aa, Artificial sequence
  synthetic peptide
YFEHRSSKL

SEQ ID NO: 2244 - protein, 9 aa, Artificial sequence
  synthetic peptide
FEHRSSKLP

SEQ ID NO: 2245 - protein, 9 aa, Artificial sequence
  synthetic peptide
EHRSSKLPW

SEQ ID NO: 2246 - protein, 9 aa, Artificial sequence
  synthetic peptide
HRSSKLPWP

SEQ ID NO: 2247 - protein, 9 aa, Artificial sequence
  synthetic peptide
RSSKLPWPE

SEQ ID NO: 2248 - protein, 9 aa, Artificial sequence
  synthetic peptide
SSKLPWPEW

SEQ ID NO: 2249 - protein, 9 aa, Artificial sequence
  synthetic peptide
SKLPWPEWM

SEQ ID NO: 2250 - protein, 9 aa, Artificial sequence
  synthetic peptide
KLPWPEWMG

SEQ ID NO: 2251 - protein, 9 aa, Artificial sequence
  synthetic peptide
LPWPEWMGV

SEQ ID NO: 2252 - protein, 9 aa, Artificial sequence
  synthetic peptide
PWPEWMGVM

SEQ ID NO: 2253 - protein, 9 aa, Artificial sequence
  synthetic peptide
WPEWMGVMH

SEQ ID NO: 2254 - protein, 9 aa, Artificial sequence
  synthetic peptide
PEWMGVMHG

SEQ ID NO: 2255 - protein, 9 aa, Artificial sequence
  synthetic peptide
EWMGVMHGY

SEQ ID NO: 2256 - protein, 9 aa, Artificial sequence
  synthetic peptide
WMGVMHGYE

SEQ ID NO: 2257 - protein, 9 aa, Artificial sequence
  synthetic peptide
MGVMHGYEI

SEQ ID NO: 2258 - protein, 9 aa, Artificial sequence
  synthetic peptide
GVMHGYEIE

SEQ ID NO: 2259 - protein, 9 aa, Artificial sequence
  synthetic peptide
VMHGYEIEF

SEQ ID NO: 2260 - protein, 9 aa, Artificial sequence
  synthetic peptide
MHGYEIEFV

SEQ ID NO: 2261 - protein, 9 aa, Artificial sequence
  synthetic peptide
HGYEIEFVF

SEQ ID NO: 2262 - protein, 9 aa, Artificial sequence
  synthetic peptide
GYEIEFVFG

SEQ ID NO: 2263 - protein, 9 aa, Artificial sequence
  synthetic peptide
YEIEFVFGL

SEQ ID NO: 2264 - protein, 9 aa, Artificial sequence
  synthetic peptide
EIEFVFGLP

SEQ ID NO: 2265 - protein, 9 aa, Artificial sequence
  synthetic peptide
IEFVFGLPL

SEQ ID NO: 2266 - protein, 9 aa, Artificial sequence
  synthetic peptide
EFVFGLPLE

SEQ ID NO: 2267 - protein, 9 aa, Artificial sequence
  synthetic peptide
FVFGLPLER

SEQ ID NO: 2268 - protein, 9 aa, Artificial sequence
  synthetic peptide
VFGLPLERR

SEQ ID NO: 2269 - protein, 9 aa, Artificial sequence
  synthetic peptide
FGLPLERRD

SEQ ID NO: 2270 - protein, 9 aa, Artificial sequence
  synthetic peptide
GLPLERRDN

SEQ ID NO: 2271 - protein, 9 aa, Artificial sequence
  synthetic peptide
LPLERRDNY

SEQ ID NO: 2272 - protein, 9 aa, Artificial sequence
  synthetic peptide
PLERRDNYT

SEQ ID NO: 2273 - protein, 9 aa, Artificial sequence
  synthetic peptide
LERRDNYTK

SEQ ID NO: 2274 - protein, 9 aa, Artificial sequence
  synthetic peptide
ERRDNYTKA

SEQ ID NO: 2275 - protein, 9 aa, Artificial sequence
  synthetic peptide
RRDNYTKAE

SEQ ID NO: 2276 - protein, 9 aa, Artificial sequence
  synthetic peptide
RDNYTKAEE

SEQ ID NO: 2277 - protein, 9 aa, Artificial sequence
  synthetic peptide
DNYTKAEEI

SEQ ID NO: 2278 - protein, 9 aa, Artificial sequence
  synthetic peptide
NYTKAEEIL

SEQ ID NO: 2279 - protein, 9 aa, Artificial sequence
  synthetic peptide
YTKAEEILS

SEQ ID NO: 2280 - protein, 9 aa, Artificial sequence
  synthetic peptide
TKAEEILSR

SEQ ID NO: 2281 - protein, 9 aa, Artificial sequence
  synthetic peptide
KAEEILSRS

SEQ ID NO: 2282 - protein, 9 aa, Artificial sequence
  synthetic peptide
AEEILSRSI

SEQ ID NO: 2283 - protein, 9 aa, Artificial sequence
  synthetic peptide
EEILSRSIV

SEQ ID NO: 2284 - protein, 9 aa, Artificial sequence
  synthetic peptide
EILSRSIVK

SEQ ID NO: 2285 - protein, 9 aa, Artificial sequence
  synthetic peptide
ILSRSIVKR

SEQ ID NO: 2286 - protein, 9 aa, Artificial sequence
  synthetic peptide
LSRSIVKRW

SEQ ID NO: 2287 - protein, 9 aa, Artificial sequence
  synthetic peptide
SRSIVKRWA

SEQ ID NO: 2288 - protein, 9 aa, Artificial sequence
  synthetic peptide
RSIVKRWAN

SEQ ID NO: 2289 - protein, 9 aa, Artificial sequence
  synthetic peptide
SIVKRWANF

SEQ ID NO: 2290 - protein, 9 aa, Artificial sequence
  synthetic peptide
IVKRWANFA

SEQ ID NO: 2291 - protein, 9 aa, Artificial sequence
  synthetic peptide
VKRWANFAK

SEQ ID NO: 2292 - protein, 9 aa, Artificial sequence
  synthetic peptide
KRWANFAKY

SEQ ID NO: 2293 - protein, 9 aa, Artificial sequence
  synthetic peptide
RWANFAKYG

SEQ ID NO: 2294 - protein, 9 aa, Artificial sequence
  synthetic peptide
WANFAKYGN

SEQ ID NO: 2295 - protein, 9 aa, Artificial sequence
  synthetic peptide
ANFAKYGNP

SEQ ID NO: 2296 - protein, 9 aa, Artificial sequence
  synthetic peptide
NFAKYGNPN

SEQ ID NO: 2297 - protein, 9 aa, Artificial sequence
  synthetic peptide
FAKYGNPNE

SEQ ID NO: 2298 - protein, 9 aa, Artificial sequence
  synthetic peptide
AKYGNPNET

SEQ ID NO: 2299 - protein, 9 aa, Artificial sequence
  synthetic peptide
KYGNPNETQ

SEQ ID NO: 2300 - protein, 9 aa, Artificial sequence
  synthetic peptide
YGNPNETQN

SEQ ID NO: 2301 - protein, 9 aa, Artificial sequence
  synthetic peptide
GNPNETQNN

SEQ ID NO: 2302 - protein, 9 aa, Artificial sequence
  synthetic peptide
NPNETQNNS

SEQ ID NO: 2303 - protein, 9 aa, Artificial sequence
  synthetic peptide
PNETQNNST

SEQ ID NO: 2304 - protein, 9 aa, Artificial sequence
  synthetic peptide
NETQNNSTS

SEQ ID NO: 2305 - protein, 9 aa, Artificial sequence
  synthetic peptide
ETQNNSTSW

SEQ ID NO: 2306 - protein, 9 aa, Artificial sequence
  synthetic peptide
TQNNSTSWP

SEQ ID NO: 2307 - protein, 9 aa, Artificial sequence
  synthetic peptide
QNNSTSWPV

SEQ ID NO: 2308 - protein, 9 aa, Artificial sequence
  synthetic peptide
NNSTSWPVF

SEQ ID NO: 2309 - protein, 9 aa, Artificial sequence
  synthetic peptide
NSTSWPVFK

SEQ ID NO: 2310 - protein, 9 aa, Artificial sequence
  synthetic peptide
STSWPVFKS

SEQ ID NO: 2311 - protein, 9 aa, Artificial sequence
  synthetic peptide
TSWPVFKST

SEQ ID NO: 2312 - protein, 9 aa, Artificial sequence
  synthetic peptide
SWPVFKSTE

SEQ ID NO: 2313 - protein, 9 aa, Artificial sequence
  synthetic peptide
WPVFKSTEQ

SEQ ID NO: 2314 - protein, 9 aa, Artificial sequence
  synthetic peptide
PVFKSTEQK

SEQ ID NO: 2315 - protein, 9 aa, Artificial sequence
  synthetic peptide
VFKSTEQKY

SEQ ID NO: 2316 - protein, 9 aa, Artificial sequence
  synthetic peptide
FKSTEQKYL

SEQ ID NO: 2317 - protein, 9 aa, Artificial sequence
  synthetic peptide
KSTEQKYLT

SEQ ID NO: 2318 - protein, 9 aa, Artificial sequence
  synthetic peptide
STEQKYLTL

SEQ ID NO: 2319 - protein, 9 aa, Artificial sequence
  synthetic peptide
TEQKYLTLN

SEQ ID NO: 2320 - protein, 9 aa, Artificial sequence
  synthetic peptide
EQKYLTLNT

SEQ ID NO: 2321 - protein, 9 aa, Artificial sequence
  synthetic peptide
QKYLTLNTE

SEQ ID NO: 2322 - protein, 9 aa, Artificial sequence
  synthetic peptide
KYLTLNTES

SEQ ID NO: 2323 - protein, 9 aa, Artificial sequence
  synthetic peptide
YLTLNTEST

SEQ ID NO: 2324 - protein, 9 aa, Artificial sequence
  synthetic peptide
LTLNTESTR

SEQ ID NO: 2325 - protein, 9 aa, Artificial sequence
  synthetic peptide
TLNTESTRI

SEQ ID NO: 2326 - protein, 9 aa, Artificial sequence
  synthetic peptide
LNTESTRIM

SEQ ID NO: 2327 - protein, 9 aa, Artificial sequence
  synthetic peptide
NTESTRIMT

SEQ ID NO: 2328 - protein, 9 aa, Artificial sequence
  synthetic peptide
TESTRIMTK

SEQ ID NO: 2329 - protein, 9 aa, Artificial sequence
  synthetic peptide
ESTRIMTKL

SEQ ID NO: 2330 - protein, 9 aa, Artificial sequence
  synthetic peptide
STRIMTKLR

SEQ ID NO: 2331 - protein, 9 aa, Artificial sequence
  synthetic peptide
TRIMTKLRA

SEQ ID NO: 2332 - protein, 9 aa, Artificial sequence
  synthetic peptide
RIMTKLRAQ

SEQ ID NO: 2333 - protein, 9 aa, Artificial sequence
  synthetic peptide
IMTKLRAQQ

SEQ ID NO: 2334 - protein, 9 aa, Artificial sequence
  synthetic peptide
MTKLRAQQC

SEQ ID NO: 2335 - protein, 9 aa, Artificial sequence
  synthetic peptide
TKLRAQQCR

SEQ ID NO: 2336 - protein, 9 aa, Artificial sequence
  synthetic peptide
KLRAQQCRF

SEQ ID NO: 2337 - protein, 9 aa, Artificial sequence
  synthetic peptide
LRAQQCRFW

SEQ ID NO: 2338 - protein, 9 aa, Artificial sequence
  synthetic peptide
RAQQCRFWT

SEQ ID NO: 2339 - protein, 9 aa, Artificial sequence
  synthetic peptide
AQQCRFWTS

SEQ ID NO: 2340 - protein, 9 aa, Artificial sequence
  synthetic peptide
QQCRFWTSF

SEQ ID NO: 2341 - protein, 9 aa, Artificial sequence
  synthetic peptide
QCRFWTSFF

SEQ ID NO: 2342 - protein, 9 aa, Artificial sequence
  synthetic peptide
CRFWTSFFP

SEQ ID NO: 2343 - protein, 9 aa, Artificial sequence
  synthetic peptide
RFWTSFFPK

SEQ ID NO: 2344 - protein, 9 aa, Artificial sequence
  synthetic peptide
FWTSFFPKV

SEQ ID NO: 2345 - protein, 9 aa, Artificial sequence
  synthetic peptide
WTSFFPKVL

SEQ ID NO: 2346 - protein, 9 aa, Artificial sequence
  synthetic peptide
TSFFPKVLE

SEQ ID NO: 2347 - protein, 9 aa, Artificial sequence
  synthetic peptide
SFFPKVLEM

SEQ ID NO: 2348 - protein, 9 aa, Artificial sequence
  synthetic peptide
FFPKVLEMT

SEQ ID NO: 2349 - protein, 9 aa, Artificial sequence
  synthetic peptide
FPKVLEMTG

SEQ ID NO: 2350 - protein, 9 aa, Artificial sequence
  synthetic peptide
PKVLEMTGN

SEQ ID NO: 2351 - protein, 9 aa, Artificial sequence
  synthetic peptide
KVLEMTGNI

SEQ ID NO: 2352 - protein, 9 aa, Artificial sequence
  synthetic peptide
VLEMTGNID

SEQ ID NO: 2353 - protein, 9 aa, Artificial sequence
  synthetic peptide
LEMTGNIDE

SEQ ID NO: 2354 - protein, 9 aa, Artificial sequence
  synthetic peptide
EMTGNIDEA

SEQ ID NO: 2355 - protein, 9 aa, Artificial sequence
  synthetic peptide
MTGNIDEAE

SEQ ID NO: 2356 - protein, 9 aa, Artificial sequence
  synthetic peptide
TGNIDEAEW

SEQ ID NO: 2357 - protein, 9 aa, Artificial sequence
  synthetic peptide
GNIDEAEWE

SEQ ID NO: 2358 - protein, 9 aa, Artificial sequence
  synthetic peptide
NIDEAEWEW

SEQ ID NO: 2359 - protein, 9 aa, Artificial sequence
  synthetic peptide
IDEAEWEWK

SEQ ID NO: 2360 - protein, 9 aa, Artificial sequence
  synthetic peptide
DEAEWEWKA

SEQ ID NO: 2361 - protein, 9 aa, Artificial sequence
  synthetic peptide
EAEWEWKAG

SEQ ID NO: 2362 - protein, 9 aa, Artificial sequence
  synthetic peptide
AEWEWKAGF

SEQ ID NO: 2363 - protein, 9 aa, Artificial sequence
  synthetic peptide
EWEWKAGFH

SEQ ID NO: 2364 - protein, 9 aa, Artificial sequence
  synthetic peptide
WEWKAGFHR

SEQ ID NO: 2365 - protein, 9 aa, Artificial sequence
  synthetic peptide
EWKAGFHRW

SEQ ID NO: 2366 - protein, 9 aa, Artificial sequence
  synthetic peptide
WKAGFHRWN

SEQ ID NO: 2367 - protein, 9 aa, Artificial sequence
  synthetic peptide
KAGFHRWNN

SEQ ID NO: 2368 - protein, 9 aa, Artificial sequence
  synthetic peptide
AGFHRWNNY

SEQ ID NO: 2369 - protein, 9 aa, Artificial sequence
  synthetic peptide
GFHRWNNYM

SEQ ID NO: 2370 - protein, 9 aa, Artificial sequence
  synthetic peptide
FHRWNNYMM

SEQ ID NO: 2371 - protein, 9 aa, Artificial sequence
  synthetic peptide
HRWNNYMMD

SEQ ID NO: 2372 - protein, 9 aa, Artificial sequence
  synthetic peptide
RWNNYMMDW

SEQ ID NO: 2373 - protein, 9 aa, Artificial sequence
  synthetic peptide
WNNYMMDWK

SEQ ID NO: 2374 - protein, 9 aa, Artificial sequence
  synthetic peptide
NNYMMDWKN

SEQ ID NO: 2375 - protein, 9 aa, Artificial sequence
  synthetic peptide
NYMMDWKNQ

SEQ ID NO: 2376 - protein, 9 aa, Artificial sequence
  synthetic peptide
YMMDWKNQF

SEQ ID NO: 2377 - protein, 9 aa, Artificial sequence
  synthetic peptide
MMDWKNQFN

SEQ ID NO: 2378 - protein, 9 aa, Artificial sequence
  synthetic peptide
MDWKNQFND

SEQ ID NO: 2379 - protein, 9 aa, Artificial sequence
  synthetic peptide
DWKNQFNDY

SEQ ID NO: 2380 - protein, 9 aa, Artificial sequence
  synthetic peptide
WKNQFNDYT

SEQ ID NO: 2381 - protein, 9 aa, Artificial sequence
  synthetic peptide
KNQFNDYTS

SEQ ID NO: 2382 - protein, 9 aa, Artificial sequence
  synthetic peptide
NQFNDYTSK

SEQ ID NO: 2383 - protein, 9 aa, Artificial sequence
  synthetic peptide
QFNDYTSKK

SEQ ID NO: 2384 - protein, 9 aa, Artificial sequence
  synthetic peptide
FNDYTSKKE

SEQ ID NO: 2385 - protein, 9 aa, Artificial sequence
  synthetic peptide
NDYTSKKES

SEQ ID NO: 2386 - protein, 9 aa, Artificial sequence
  synthetic peptide
DYTSKKESC

SEQ ID NO: 2387 - protein, 9 aa, Artificial sequence
  synthetic peptide
YTSKKESCV

SEQ ID NO: 2388 - protein, 9 aa, Artificial sequence
  synthetic peptide
TSKKESCVG

SEQ ID NO: 2389 - protein, 9 aa, Artificial sequence
  synthetic peptide
SKKESCVGL

SEQ ID NO: 2390 - protein, 10 aa, Artificial sequence
  synthetic peptide
MHSKVTIICI

SEQ ID NO: 2391 - protein, 10 aa, Artificial sequence
  synthetic peptide
HSKVTIICIR

SEQ ID NO: 2392 - protein, 10 aa, Artificial sequence
  synthetic peptide
SKVTIICIRF

SEQ ID NO: 2393 - protein, 10 aa, Artificial sequence
  synthetic peptide
KVTIICIRFL

SEQ ID NO: 2394 - protein, 10 aa, Artificial sequence
  synthetic peptide
VTIICIRFLF

SEQ ID NO: 2395 - protein, 10 aa, Artificial sequence
  synthetic peptide
TIICIRFLFW

SEQ ID NO: 2396 - protein, 10 aa, Artificial sequence
  synthetic peptide
IICIRFLFWF

SEQ ID NO: 2397 - protein, 10 aa, Artificial sequence
  synthetic peptide
ICIRFLFWFL

SEQ ID NO: 2398 - protein, 10 aa, Artificial sequence
  synthetic peptide
CIRFLFWFLL

SEQ ID NO: 2399 - protein, 10 aa, Artificial sequence
  synthetic peptide
IRFLFWFLLL

SEQ ID NO: 2400 - protein, 10 aa, Artificial sequence
  synthetic peptide
RFLFWFLLLC

SEQ ID NO: 2401 - protein, 10 aa, Artificial sequence
  synthetic peptide
FLFWFLLLCM

SEQ ID NO: 2402 - protein, 10 aa, Artificial sequence
  synthetic peptide
LFWFLLLCML

SEQ ID NO: 2403 - protein, 10 aa, Artificial sequence
  synthetic peptide
FWFLLLCMLI

SEQ ID NO: 2404 - protein, 10 aa, Artificial sequence
  synthetic peptide
WFLLLCMLIG

SEQ ID NO: 2405 - protein, 10 aa, Artificial sequence
  synthetic peptide
FLLLCMLIGK

SEQ ID NO: 2406 - protein, 10 aa, Artificial sequence
  synthetic peptide
LLLCMLIGKS

SEQ ID NO: 2407 - protein, 10 aa, Artificial sequence
  synthetic peptide
LLCMLIGKSH

SEQ ID NO: 2408 - protein, 10 aa, Artificial sequence
  synthetic peptide
LCMLIGKSHT

SEQ ID NO: 2409 - protein, 10 aa, Artificial sequence
  synthetic peptide
CMLIGKSHTE

SEQ ID NO: 2410 - protein, 10 aa, Artificial sequence
  synthetic peptide
MLIGKSHTED

SEQ ID NO: 2411 - protein, 10 aa, Artificial sequence
  synthetic peptide
LIGKSHTEDD

SEQ ID NO: 2412 - protein, 10 aa, Artificial sequence
  synthetic peptide
IGKSHTEDDI

SEQ ID NO: 2413 - protein, 10 aa, Artificial sequence
  synthetic peptide
GKSHTEDDII

SEQ ID NO: 2414 - protein, 10 aa, Artificial sequence
  synthetic peptide
KSHTEDDIII

SEQ ID NO: 2415 - protein, 10 aa, Artificial sequence
  synthetic peptide
SHTEDDIIIA

SEQ ID NO: 2416 - protein, 10 aa, Artificial sequence
  synthetic peptide
HTEDDIIIAT

SEQ ID NO: 2417 - protein, 10 aa, Artificial sequence
  synthetic peptide
TEDDIIIATK

SEQ ID NO: 2418 - protein, 10 aa, Artificial sequence
  synthetic peptide
EDDIIIATKN

SEQ ID NO: 2419 - protein, 10 aa, Artificial sequence
  synthetic peptide
DDIIIATKNG

SEQ ID NO: 2420 - protein, 10 aa, Artificial sequence
  synthetic peptide
DIIIATKNGK

SEQ ID NO: 2421 - protein, 10 aa, Artificial sequence
  synthetic peptide
IIIATKNGKV

SEQ ID NO: 2422 - protein, 10 aa, Artificial sequence
  synthetic peptide
IIATKNGKVR

SEQ ID NO: 2423 - protein, 10 aa, Artificial sequence
  synthetic peptide
IATKNGKVRG

SEQ ID NO: 2424 - protein, 10 aa, Artificial sequence
  synthetic peptide
ATKNGKVRGM

SEQ ID NO: 2425 - protein, 10 aa, Artificial sequence
  synthetic peptide
TKNGKVRGMN

SEQ ID NO: 2426 - protein, 10 aa, Artificial sequence
  synthetic peptide
KNGKVRGMNL

SEQ ID NO: 2427 - protein, 10 aa, Artificial sequence
  synthetic peptide
NGKVRGMNLT

SEQ ID NO: 2428 - protein, 10 aa, Artificial sequence
  synthetic peptide
GKVRGMNLTV

SEQ ID NO: 2429 - protein, 10 aa, Artificial sequence
  synthetic peptide
KVRGMNLTVF

SEQ ID NO: 2430 - protein, 10 aa, Artificial sequence
  synthetic peptide
VRGMNLTVFG

SEQ ID NO: 2431 - protein, 10 aa, Artificial sequence
  synthetic peptide
RGMNLTVFGG

SEQ ID NO: 2432 - protein, 10 aa, Artificial sequence
  synthetic peptide
GMNLTVFGGT

SEQ ID NO: 2433 - protein, 10 aa, Artificial sequence
  synthetic peptide
MNLTVFGGTV

SEQ ID NO: 2434 - protein, 10 aa, Artificial sequence
  synthetic peptide
NLTVFGGTVT

SEQ ID NO: 2435 - protein, 10 aa, Artificial sequence
  synthetic peptide
LTVFGGTVTA

SEQ ID NO: 2436 - protein, 10 aa, Artificial sequence
  synthetic peptide
TVFGGTVTAF

SEQ ID NO: 2437 - protein, 10 aa, Artificial sequence
  synthetic peptide
VFGGTVTAFL

SEQ ID NO: 2438 - protein, 10 aa, Artificial sequence
  synthetic peptide
FGGTVTAFLG

SEQ ID NO: 2439 - protein, 10 aa, Artificial sequence
  synthetic peptide
GGTVTAFLGI

SEQ ID NO: 2440 - protein, 10 aa, Artificial sequence
  synthetic peptide
GTVTAFLGIP

SEQ ID NO: 2441 - protein, 10 aa, Artificial sequence
  synthetic peptide
TVTAFLGIPY

SEQ ID NO: 2442 - protein, 10 aa, Artificial sequence
  synthetic peptide
VTAFLGIPYA

SEQ ID NO: 2443 - protein, 10 aa, Artificial sequence
  synthetic peptide
TAFLGIPYAQ

SEQ ID NO: 2444 - protein, 10 aa, Artificial sequence
  synthetic peptide
AFLGIPYAQP

SEQ ID NO: 2445 - protein, 10 aa, Artificial sequence
  synthetic peptide
FLGIPYAQPP

SEQ ID NO: 2446 - protein, 10 aa, Artificial sequence
  synthetic peptide
LGIPYAQPPL

SEQ ID NO: 2447 - protein, 10 aa, Artificial sequence
  synthetic peptide
GIPYAQPPLG

SEQ ID NO: 2448 - protein, 10 aa, Artificial sequence
  synthetic peptide
IPYAQPPLGR

SEQ ID NO: 2449 - protein, 10 aa, Artificial sequence
  synthetic peptide
PYAQPPLGRL

SEQ ID NO: 2450 - protein, 10 aa, Artificial sequence
  synthetic peptide
YAQPPLGRLR

SEQ ID NO: 2451 - protein, 10 aa, Artificial sequence
  synthetic peptide
AQPPLGRLRF

SEQ ID NO: 2452 - protein, 10 aa, Artificial sequence
  synthetic peptide
QPPLGRLRFK

SEQ ID NO: 2453 - protein, 10 aa, Artificial sequence
  synthetic peptide
PPLGRLRFKK

SEQ ID NO: 2454 - protein, 10 aa, Artificial sequence
  synthetic peptide
PLGRLRFKKP

SEQ ID NO: 2455 - protein, 10 aa, Artificial sequence
  synthetic peptide
LGRLRFKKPQ

SEQ ID NO: 2456 - protein, 10 aa, Artificial sequence
  synthetic peptide
GRLRFKKPQS

SEQ ID NO: 2457 - protein, 10 aa, Artificial sequence
  synthetic peptide
RLRFKKPQSL

SEQ ID NO: 2458 - protein, 10 aa, Artificial sequence
  synthetic peptide
LRFKKPQSLT

SEQ ID NO: 2459 - protein, 10 aa, Artificial sequence
  synthetic peptide
RFKKPQSLTK

SEQ ID NO: 2460 - protein, 10 aa, Artificial sequence
  synthetic peptide
FKKPQSLTKW

SEQ ID NO: 2461 - protein, 10 aa, Artificial sequence
  synthetic peptide
KKPQSLTKWS

SEQ ID NO: 2462 - protein, 10 aa, Artificial sequence
  synthetic peptide
KPQSLTKWSD

SEQ ID NO: 2463 - protein, 10 aa, Artificial sequence
  synthetic peptide
PQSLTKWSDI

SEQ ID NO: 2464 - protein, 10 aa, Artificial sequence
  synthetic peptide
QSLTKWSDIW

SEQ ID NO: 2465 - protein, 10 aa, Artificial sequence
  synthetic peptide
SLTKWSDIWN

SEQ ID NO: 2466 - protein, 10 aa, Artificial sequence
  synthetic peptide
LTKWSDIWNA

SEQ ID NO: 2467 - protein, 10 aa, Artificial sequence
  synthetic peptide
TKWSDIWNAT

SEQ ID NO: 2468 - protein, 10 aa, Artificial sequence
  synthetic peptide
KWSDIWNATK

SEQ ID NO: 2469 - protein, 10 aa, Artificial sequence
  synthetic peptide
WSDIWNATKY

SEQ ID NO: 2470 - protein, 10 aa, Artificial sequence
  synthetic peptide
SDIWNATKYA

SEQ ID NO: 2471 - protein, 10 aa, Artificial sequence
  synthetic peptide
DIWNATKYAN

SEQ ID NO: 2472 - protein, 10 aa, Artificial sequence
  synthetic peptide
IWNATKYANS

SEQ ID NO: 2473 - protein, 10 aa, Artificial sequence
  synthetic peptide
WNATKYANSC

SEQ ID NO: 2474 - protein, 10 aa, Artificial sequence
  synthetic peptide
NATKYANSCC

SEQ ID NO: 2475 - protein, 10 aa, Artificial sequence
  synthetic peptide
ATKYANSCCQ

SEQ ID NO: 2476 - protein, 10 aa, Artificial sequence
  synthetic peptide
TKYANSCCQN

SEQ ID NO: 2477 - protein, 10 aa, Artificial sequence
  synthetic peptide
KYANSCCQNI

SEQ ID NO: 2478 - protein, 10 aa, Artificial sequence
  synthetic peptide
YANSCCQNID

SEQ ID NO: 2479 - protein, 10 aa, Artificial sequence
  synthetic peptide
ANSCCQNIDQ

SEQ ID NO: 2480 - protein, 10 aa, Artificial sequence
  synthetic peptide
NSCCQNIDQS

SEQ ID NO: 2481 - protein, 10 aa, Artificial sequence
  synthetic peptide
SCCQNIDQSF

SEQ ID NO: 2482 - protein, 10 aa, Artificial sequence
  synthetic peptide
CCQNIDQSFP

SEQ ID NO: 2483 - protein, 10 aa, Artificial sequence
  synthetic peptide
CQNIDQSFPG

SEQ ID NO: 2484 - protein, 10 aa, Artificial sequence
  synthetic peptide
QNIDQSFPGF

SEQ ID NO: 2485 - protein, 10 aa, Artificial sequence
  synthetic peptide
NIDQSFPGFH

SEQ ID NO: 2486 - protein, 10 aa, Artificial sequence
  synthetic peptide
IDQSFPGFHG

SEQ ID NO: 2487 - protein, 10 aa, Artificial sequence
  synthetic peptide
DQSFPGFHGS

SEQ ID NO: 2488 - protein, 10 aa, Artificial sequence
  synthetic peptide
QSFPGFHGSE

SEQ ID NO: 2489 - protein, 10 aa, Artificial sequence
  synthetic peptide
SFPGFHGSEM

SEQ ID NO: 2490 - protein, 10 aa, Artificial sequence
  synthetic peptide
FPGFHGSEMW

SEQ ID NO: 2491 - protein, 10 aa, Artificial sequence
  synthetic peptide
PGFHGSEMWN

SEQ ID NO: 2492 - protein, 10 aa, Artificial sequence
  synthetic peptide
GFHGSEMWNP

SEQ ID NO: 2493 - protein, 10 aa, Artificial sequence
  synthetic peptide
FHGSEMWNPN

SEQ ID NO: 2494 - protein, 10 aa, Artificial sequence
  synthetic peptide
HGSEMWNPNT

SEQ ID NO: 2495 - protein, 10 aa, Artificial sequence
  synthetic peptide
GSEMWNPNTD

SEQ ID NO: 2496 - protein, 10 aa, Artificial sequence
  synthetic peptide
SEMWNPNTDL

SEQ ID NO: 2497 - protein, 10 aa, Artificial sequence
  synthetic peptide
EMWNPNTDLS

SEQ ID NO: 2498 - protein, 10 aa, Artificial sequence
  synthetic peptide
MWNPNTDLSE

SEQ ID NO: 2499 - protein, 10 aa, Artificial sequence
  synthetic peptide
WNPNTDLSED

SEQ ID NO: 2500 - protein, 10 aa, Artificial sequence
  synthetic peptide
NPNTDLSEDC

SEQ ID NO: 2501 - protein, 10 aa, Artificial sequence
  synthetic peptide
PNTDLSEDCL

SEQ ID NO: 2502 - protein, 10 aa, Artificial sequence
  synthetic peptide
NTDLSEDCLY

SEQ ID NO: 2503 - protein, 10 aa, Artificial sequence
  synthetic peptide
TDLSEDCLYL

SEQ ID NO: 2504 - protein, 10 aa, Artificial sequence
  synthetic peptide
DLSEDCLYLN

SEQ ID NO: 2505 - protein, 10 aa, Artificial sequence
  synthetic peptide
LSEDCLYLNV

SEQ ID NO: 2506 - protein, 10 aa, Artificial sequence
  synthetic peptide
SEDCLYLNVW

SEQ ID NO: 2507 - protein, 10 aa, Artificial sequence
  synthetic peptide
EDCLYLNVWI

SEQ ID NO: 2508 - protein, 10 aa, Artificial sequence
  synthetic peptide
DCLYLNVWIP

SEQ ID NO: 2509 - protein, 10 aa, Artificial sequence
  synthetic peptide
CLYLNVWIPA

SEQ ID NO: 2510 - protein, 10 aa, Artificial sequence
  synthetic peptide
LYLNVWIPAP

SEQ ID NO: 2511 - protein, 10 aa, Artificial sequence
  synthetic peptide
YLNVWIPAPK

SEQ ID NO: 2512 - protein, 10 aa, Artificial sequence
  synthetic peptide
LNVWIPAPKP

SEQ ID NO: 2513 - protein, 10 aa, Artificial sequence
  synthetic peptide
NVWIPAPKPK

SEQ ID NO: 2514 - protein, 10 aa, Artificial sequence
  synthetic peptide
VWIPAPKPKN

SEQ ID NO: 2515 - protein, 10 aa, Artificial sequence
  synthetic peptide
WIPAPKPKNA

SEQ ID NO: 2516 - protein, 10 aa, Artificial sequence
  synthetic peptide
IPAPKPKNAT

SEQ ID NO: 2517 - protein, 10 aa, Artificial sequence
  synthetic peptide
PAPKPKNATV

SEQ ID NO: 2518 - protein, 10 aa, Artificial sequence
  synthetic peptide
APKPKNATVL

SEQ ID NO: 2519 - protein, 10 aa, Artificial sequence
  synthetic peptide
PKPKNATVLI

SEQ ID NO: 2520 - protein, 10 aa, Artificial sequence
  synthetic peptide
KPKNATVLIW

SEQ ID NO: 2521 - protein, 10 aa, Artificial sequence
  synthetic peptide
PKNATVLIWI

SEQ ID NO: 2522 - protein, 10 aa, Artificial sequence
  synthetic peptide
KNATVLIWIY

SEQ ID NO: 2523 - protein, 10 aa, Artificial sequence
  synthetic peptide
NATVLIWIYG

SEQ ID NO: 2524 - protein, 10 aa, Artificial sequence
  synthetic peptide
ATVLIWIYGG

SEQ ID NO: 2525 - protein, 10 aa, Artificial sequence
  synthetic peptide
TVLIWIYGGG

SEQ ID NO: 2526 - protein, 10 aa, Artificial sequence
  synthetic peptide
VLIWIYGGGF

SEQ ID NO: 2527 - protein, 10 aa, Artificial sequence
  synthetic peptide
LIWIYGGGFQ

SEQ ID NO: 2528 - protein, 10 aa, Artificial sequence
  synthetic peptide
IWIYGGGFQT

SEQ ID NO: 2529 - protein, 10 aa, Artificial sequence
  synthetic peptide
WIYGGGFQTG

SEQ ID NO: 2530 - protein, 10 aa, Artificial sequence
  synthetic peptide
IYGGGFQTGT

SEQ ID NO: 2531 - protein, 10 aa, Artificial sequence
  synthetic peptide
YGGGFQTGTS

SEQ ID NO: 2532 - protein, 10 aa, Artificial sequence
  synthetic peptide
GGGFQTGTSS

SEQ ID NO: 2533 - protein, 10 aa, Artificial sequence
  synthetic peptide
GGFQTGTSSL

SEQ ID NO: 2534 - protein, 10 aa, Artificial sequence
  synthetic peptide
GFQTGTSSLH

SEQ ID NO: 2535 - protein, 10 aa, Artificial sequence
  synthetic peptide
FQTGTSSLHV

SEQ ID NO: 2536 - protein, 10 aa, Artificial sequence
  synthetic peptide
QTGTSSLHVY

SEQ ID NO: 2537 - protein, 10 aa, Artificial sequence
  synthetic peptide
TGTSSLHVYD

SEQ ID NO: 2538 - protein, 10 aa, Artificial sequence
  synthetic peptide
GTSSLHVYDG

SEQ ID NO: 2539 - protein, 10 aa, Artificial sequence
  synthetic peptide
TSSLHVYDGK

SEQ ID NO: 2540 - protein, 10 aa, Artificial sequence
  synthetic peptide
SSLHVYDGKF

SEQ ID NO: 2541 - protein, 10 aa, Artificial sequence
  synthetic peptide
SLHVYDGKFL

SEQ ID NO: 2542 - protein, 10 aa, Artificial sequence
  synthetic peptide
LHVYDGKFLA

SEQ ID NO: 2543 - protein, 10 aa, Artificial sequence
  synthetic peptide
HVYDGKFLAR

SEQ ID NO: 2544 - protein, 10 aa, Artificial sequence
  synthetic peptide
VYDGKFLARV

SEQ ID NO: 2545 - protein, 10 aa, Artificial sequence
  synthetic peptide
YDGKFLARVE

SEQ ID NO: 2546 - protein, 10 aa, Artificial sequence
  synthetic peptide
DGKFLARVER

SEQ ID NO: 2547 - protein, 10 aa, Artificial sequence
  synthetic peptide
GKFLARVERV

SEQ ID NO: 2548 - protein, 10 aa, Artificial sequence
  synthetic peptide
KFLARVERVI

SEQ ID NO: 2549 - protein, 10 aa, Artificial sequence
  synthetic peptide
FLARVERVIV

SEQ ID NO: 2550 - protein, 10 aa, Artificial sequence
  synthetic peptide
LARVERVIVV

SEQ ID NO: 2551 - protein, 10 aa, Artificial sequence
  synthetic peptide
ARVERVIVVS

SEQ ID NO: 2552 - protein, 10 aa, Artificial sequence
  synthetic peptide
RVERVIVVSM

SEQ ID NO: 2553 - protein, 10 aa, Artificial sequence
  synthetic peptide
VERVIVVSMN

SEQ ID NO: 2554 - protein, 10 aa, Artificial sequence
  synthetic peptide
ERVIVVSMNY

SEQ ID NO: 2555 - protein, 10 aa, Artificial sequence
  synthetic peptide
RVIVVSMNYR

SEQ ID NO: 2556 - protein, 10 aa, Artificial sequence
  synthetic peptide
VIVVSMNYRV

SEQ ID NO: 2557 - protein, 10 aa, Artificial sequence
  synthetic peptide
IVVSMNYRVG

SEQ ID NO: 2558 - protein, 10 aa, Artificial sequence
  synthetic peptide
VVSMNYRVGA

SEQ ID NO: 2559 - protein, 10 aa, Artificial sequence
  synthetic peptide
VSMNYRVGAL

SEQ ID NO: 2560 - protein, 10 aa, Artificial sequence
  synthetic peptide
SMNYRVGALG

SEQ ID NO: 2561 - protein, 10 aa, Artificial sequence
  synthetic peptide
MNYRVGALGF

SEQ ID NO: 2562 - protein, 10 aa, Artificial sequence
  synthetic peptide
NYRVGALGFL

SEQ ID NO: 2563 - protein, 10 aa, Artificial sequence
  synthetic peptide
YRVGALGFLA

SEQ ID NO: 2564 - protein, 10 aa, Artificial sequence
  synthetic peptide
RVGALGFLAL

SEQ ID NO: 2565 - protein, 10 aa, Artificial sequence
  synthetic peptide
VGALGFLALP

SEQ ID NO: 2566 - protein, 10 aa, Artificial sequence
  synthetic peptide
GALGFLALPG

SEQ ID NO: 2567 - protein, 10 aa, Artificial sequence
  synthetic peptide
ALGFLALPGN

SEQ ID NO: 2568 - protein, 10 aa, Artificial sequence
  synthetic peptide
LGFLALPGNP

SEQ ID NO: 2569 - protein, 10 aa, Artificial sequence
  synthetic peptide
GFLALPGNPE

SEQ ID NO: 2570 - protein, 10 aa, Artificial sequence
  synthetic peptide
FLALPGNPEA

SEQ ID NO: 2571 - protein, 10 aa, Artificial sequence
  synthetic peptide
LALPGNPEAP

SEQ ID NO: 2572 - protein, 10 aa, Artificial sequence
  synthetic peptide
ALPGNPEAPG

SEQ ID NO: 2573 - protein, 10 aa, Artificial sequence
  synthetic peptide
LPGNPEAPGN

SEQ ID NO: 2574 - protein, 10 aa, Artificial sequence
  synthetic peptide
PGNPEAPGNM

SEQ ID NO: 2575 - protein, 10 aa, Artificial sequence
  synthetic peptide
GNPEAPGNMG

SEQ ID NO: 2576 - protein, 10 aa, Artificial sequence
  synthetic peptide
NPEAPGNMGL

SEQ ID NO: 2577 - protein, 10 aa, Artificial sequence
  synthetic peptide
PEAPGNMGLF

SEQ ID NO: 2578 - protein, 10 aa, Artificial sequence
  synthetic peptide
EAPGNMGLFD

SEQ ID NO: 2579 - protein, 10 aa, Artificial sequence
  synthetic peptide
APGNMGLFDQ

SEQ ID NO: 2580 - protein, 10 aa, Artificial sequence
  synthetic peptide
PGNMGLFDQQ

SEQ ID NO: 2581 - protein, 10 aa, Artificial sequence
  synthetic peptide
GNMGLFDQQL

SEQ ID NO: 2582 - protein, 10 aa, Artificial sequence
  synthetic peptide
NMGLFDQQLA

SEQ ID NO: 2583 - protein, 10 aa, Artificial sequence
  synthetic peptide
MGLFDQQLAL

SEQ ID NO: 2584 - protein, 10 aa, Artificial sequence
  synthetic peptide
GLFDQQLALQ

SEQ ID NO: 2585 - protein, 10 aa, Artificial sequence
  synthetic peptide
LFDQQLALQW

SEQ ID NO: 2586 - protein, 10 aa, Artificial sequence
  synthetic peptide
FDQQLALQWV

SEQ ID NO: 2587 - protein, 10 aa, Artificial sequence
  synthetic peptide
DQQLALQWVQ

SEQ ID NO: 2588 - protein, 10 aa, Artificial sequence
  synthetic peptide
QQLALQWVQK

SEQ ID NO: 2589 - protein, 10 aa, Artificial sequence
  synthetic peptide
QLALQWVQKN

SEQ ID NO: 2590 - protein, 10 aa, Artificial sequence
  synthetic peptide
LALQWVQKNI

SEQ ID NO: 2591 - protein, 10 aa, Artificial sequence
  synthetic peptide
ALQWVQKNIA

SEQ ID NO: 2592 - protein, 10 aa, Artificial sequence
  synthetic peptide
LQWVQKNIAA

SEQ ID NO: 2593 - protein, 10 aa, Artificial sequence
  synthetic peptide
QWVQKNIAAF

SEQ ID NO: 2594 - protein, 10 aa, Artificial sequence
  synthetic peptide
WVQKNIAAFG

SEQ ID NO: 2595 - protein, 10 aa, Artificial sequence
  synthetic peptide
VQKNIAAFGG

SEQ ID NO: 2596 - protein, 10 aa, Artificial sequence
  synthetic peptide
QKNIAAFGGN

SEQ ID NO: 2597 - protein, 10 aa, Artificial sequence
  synthetic peptide
KNIAAFGGNP

SEQ ID NO: 2598 - protein, 10 aa, Artificial sequence
  synthetic peptide
NIAAFGGNPK

SEQ ID NO: 2599 - protein, 10 aa, Artificial sequence
  synthetic peptide
IAAFGGNPKS

SEQ ID NO: 2600 - protein, 10 aa, Artificial sequence
  synthetic peptide
AAFGGNPKSV

SEQ ID NO: 2601 - protein, 10 aa, Artificial sequence
  synthetic peptide
AFGGNPKSVT

SEQ ID NO: 2602 - protein, 10 aa, Artificial sequence
  synthetic peptide
FGGNPKSVTL

SEQ ID NO: 2603 - protein, 10 aa, Artificial sequence
  synthetic peptide
GGNPKSVTLF

SEQ ID NO: 2604 - protein, 10 aa, Artificial sequence
  synthetic peptide
GNPKSVTLFG

SEQ ID NO: 2605 - protein, 10 aa, Artificial sequence
  synthetic peptide
NPKSVTLFGE

SEQ ID NO: 2606 - protein, 10 aa, Artificial sequence
  synthetic peptide
PKSVTLFGES

SEQ ID NO: 2607 - protein, 10 aa, Artificial sequence
  synthetic peptide
KSVTLFGESA

SEQ ID NO: 2608 - protein, 10 aa, Artificial sequence
  synthetic peptide
SVTLFGESAG

SEQ ID NO: 2609 - protein, 10 aa, Artificial sequence
  synthetic peptide
VTLFGESAGA

SEQ ID NO: 2610 - protein, 10 aa, Artificial sequence
  synthetic peptide
TLFGESAGAA

SEQ ID NO: 2611 - protein, 10 aa, Artificial sequence
  synthetic peptide
LFGESAGAAS

SEQ ID NO: 2612 - protein, 10 aa, Artificial sequence
  synthetic peptide
FGESAGAASV

SEQ ID NO: 2613 - protein, 10 aa, Artificial sequence
  synthetic peptide
GESAGAASVS

SEQ ID NO: 2614 - protein, 10 aa, Artificial sequence
  synthetic peptide
ESAGAASVSL

SEQ ID NO: 2615 - protein, 10 aa, Artificial sequence
  synthetic peptide
SAGAASVSLH

SEQ ID NO: 2616 - protein, 10 aa, Artificial sequence
  synthetic peptide
AGAASVSLHL

SEQ ID NO: 2617 - protein, 10 aa, Artificial sequence
  synthetic peptide
GAASVSLHLL

SEQ ID NO: 2618 - protein, 10 aa, Artificial sequence
  synthetic peptide
AASVSLHLLS

SEQ ID NO: 2619 - protein, 10 aa, Artificial sequence
  synthetic peptide
ASVSLHLLSP

SEQ ID NO: 2620 - protein, 10 aa, Artificial sequence
  synthetic peptide
SVSLHLLSPG

SEQ ID NO: 2621 - protein, 10 aa, Artificial sequence
  synthetic peptide
VSLHLLSPGS

SEQ ID NO: 2622 - protein, 10 aa, Artificial sequence
  synthetic peptide
SLHLLSPGSH

SEQ ID NO: 2623 - protein, 10 aa, Artificial sequence
  synthetic peptide
LHLLSPGSHS

SEQ ID NO: 2624 - protein, 10 aa, Artificial sequence
  synthetic peptide
HLLSPGSHSL

SEQ ID NO: 2625 - protein, 10 aa, Artificial sequence
  synthetic peptide
LLSPGSHSLF

SEQ ID NO: 2626 - protein, 10 aa, Artificial sequence
  synthetic peptide
LSPGSHSLFT

SEQ ID NO: 2627 - protein, 10 aa, Artificial sequence
  synthetic peptide
SPGSHSLFTR

SEQ ID NO: 2628 - protein, 10 aa, Artificial sequence
  synthetic peptide
PGSHSLFTRA

SEQ ID NO: 2629 - protein, 10 aa, Artificial sequence
  synthetic peptide
GSHSLFTRAI

SEQ ID NO: 2630 - protein, 10 aa, Artificial sequence
  synthetic peptide
SHSLFTRAIL

SEQ ID NO: 2631 - protein, 10 aa, Artificial sequence
  synthetic peptide
HSLFTRAILQ

SEQ ID NO: 2632 - protein, 10 aa, Artificial sequence
  synthetic peptide
SLFTRAILQS

SEQ ID NO: 2633 - protein, 10 aa, Artificial sequence
  synthetic peptide
LFTRAILQSG

SEQ ID NO: 2634 - protein, 10 aa, Artificial sequence
  synthetic peptide
FTRAILQSGS

SEQ ID NO: 2635 - protein, 10 aa, Artificial sequence
  synthetic peptide
TRAILQSGSF

SEQ ID NO: 2636 - protein, 10 aa, Artificial sequence
  synthetic peptide
RAILQSGSFN

SEQ ID NO: 2637 - protein, 10 aa, Artificial sequence
  synthetic peptide
AILQSGSFNA

SEQ ID NO: 2638 - protein, 10 aa, Artificial sequence
  synthetic peptide
ILQSGSFNAP

SEQ ID NO: 2639 - protein, 10 aa, Artificial sequence
  synthetic peptide
LQSGSFNAPW

SEQ ID NO: 2640 - protein, 10 aa, Artificial sequence
  synthetic peptide
QSGSFNAPWA

SEQ ID NO: 2641 - protein, 10 aa, Artificial sequence
  synthetic peptide
SGSFNAPWAV

SEQ ID NO: 2642 - protein, 10 aa, Artificial sequence
  synthetic peptide
GSFNAPWAVT

SEQ ID NO: 2643 - protein, 10 aa, Artificial sequence
  synthetic peptide
SFNAPWAVTS

SEQ ID NO: 2644 - protein, 10 aa, Artificial sequence
  synthetic peptide
FNAPWAVTSL

SEQ ID NO: 2645 - protein, 10 aa, Artificial sequence
  synthetic peptide
NAPWAVTSLY

SEQ ID NO: 2646 - protein, 10 aa, Artificial sequence
  synthetic peptide
APWAVTSLYE

SEQ ID NO: 2647 - protein, 10 aa, Artificial sequence
  synthetic peptide
PWAVTSLYEA

SEQ ID NO: 2648 - protein, 10 aa, Artificial sequence
  synthetic peptide
WAVTSLYEAR

SEQ ID NO: 2649 - protein, 10 aa, Artificial sequence
  synthetic peptide
AVTSLYEARN

SEQ ID NO: 2650 - protein, 10 aa, Artificial sequence
  synthetic peptide
VTSLYEARNR

SEQ ID NO: 2651 - protein, 10 aa, Artificial sequence
  synthetic peptide
TSLYEARNRT

SEQ ID NO: 2652 - protein, 10 aa, Artificial sequence
  synthetic peptide
SLYEARNRTL

SEQ ID NO: 2653 - protein, 10 aa, Artificial sequence
  synthetic peptide
LYEARNRTLN

SEQ ID NO: 2654 - protein, 10 aa, Artificial sequence
  synthetic peptide
YEARNRTLNL

SEQ ID NO: 2655 - protein, 10 aa, Artificial sequence
  synthetic peptide
EARNRTLNLA

SEQ ID NO: 2656 - protein, 10 aa, Artificial sequence
  synthetic peptide
ARNRTLNLAK

SEQ ID NO: 2657 - protein, 10 aa, Artificial sequence
  synthetic peptide
RNRTLNLAKL

SEQ ID NO: 2658 - protein, 10 aa, Artificial sequence
  synthetic peptide
NRTLNLAKLT

SEQ ID NO: 2659 - protein, 10 aa, Artificial sequence
  synthetic peptide
RTLNLAKLTG

SEQ ID NO: 2660 - protein, 10 aa, Artificial sequence
  synthetic peptide
TLNLAKLTGC

SEQ ID NO: 2661 - protein, 10 aa, Artificial sequence
  synthetic peptide
LNLAKLTGCS

SEQ ID NO: 2662 - protein, 10 aa, Artificial sequence
  synthetic peptide
NLAKLTGCSR

SEQ ID NO: 2663 - protein, 10 aa, Artificial sequence
  synthetic peptide
LAKLTGCSRE

SEQ ID NO: 2664 - protein, 10 aa, Artificial sequence
  synthetic peptide
AKLTGCSREN

SEQ ID NO: 2665 - protein, 10 aa, Artificial sequence
  synthetic peptide
KLTGCSRENE

SEQ ID NO: 2666 - protein, 10 aa, Artificial sequence
  synthetic peptide
LTGCSRENET

SEQ ID NO: 2667 - protein, 10 aa, Artificial sequence
  synthetic peptide
TGCSRENETE

SEQ ID NO: 2668 - protein, 10 aa, Artificial sequence
  synthetic peptide
GCSRENETEI

SEQ ID NO: 2669 - protein, 10 aa, Artificial sequence
  synthetic peptide
CSRENETEII

SEQ ID NO: 2670 - protein, 10 aa, Artificial sequence
  synthetic peptide
SRENETEIIK

SEQ ID NO: 2671 - protein, 10 aa, Artificial sequence
  synthetic peptide
RENETEIIKC

SEQ ID NO: 2672 - protein, 10 aa, Artificial sequence
  synthetic peptide
ENETEIIKCL

SEQ ID NO: 2673 - protein, 10 aa, Artificial sequence
  synthetic peptide
NETEIIKCLR

SEQ ID NO: 2674 - protein, 10 aa, Artificial sequence
  synthetic peptide
ETEIIKCLRN

SEQ ID NO: 2675 - protein, 10 aa, Artificial sequence
  synthetic peptide
TEIIKCLRNK

SEQ ID NO: 2676 - protein, 10 aa, Artificial sequence
  synthetic peptide
EIIKCLRNKD

SEQ ID NO: 2677 - protein, 10 aa, Artificial sequence
  synthetic peptide
IIKCLRNKDP

SEQ ID NO: 2678 - protein, 10 aa, Artificial sequence
  synthetic peptide
IKCLRNKDPQ

SEQ ID NO: 2679 - protein, 10 aa, Artificial sequence
  synthetic peptide
KCLRNKDPQE

SEQ ID NO: 2680 - protein, 10 aa, Artificial sequence
  synthetic peptide
CLRNKDPQEI

SEQ ID NO: 2681 - protein, 10 aa, Artificial sequence
  synthetic peptide
LRNKDPQEIL

SEQ ID NO: 2682 - protein, 10 aa, Artificial sequence
  synthetic peptide
RNKDPQEILL

SEQ ID NO: 2683 - protein, 10 aa, Artificial sequence
  synthetic peptide
NKDPQEILLN

SEQ ID NO: 2684 - protein, 10 aa, Artificial sequence
  synthetic peptide
KDPQEILLNE

SEQ ID NO: 2685 - protein, 10 aa, Artificial sequence
  synthetic peptide
DPQEILLNEA

SEQ ID NO: 2686 - protein, 10 aa, Artificial sequence
  synthetic peptide
PQEILLNEAF

SEQ ID NO: 2687 - protein, 10 aa, Artificial sequence
  synthetic peptide
QEILLNEAFV

SEQ ID NO: 2688 - protein, 10 aa, Artificial sequence
  synthetic peptide
EILLNEAFVV

SEQ ID NO: 2689 - protein, 10 aa, Artificial sequence
  synthetic peptide
ILLNEAFVVP

SEQ ID NO: 2690 - protein, 10 aa, Artificial sequence
  synthetic peptide
LLNEAFVVPY

SEQ ID NO: 2691 - protein, 10 aa, Artificial sequence
  synthetic peptide
LNEAFVVPYG

SEQ ID NO: 2692 - protein, 10 aa, Artificial sequence
  synthetic peptide
NEAFVVPYGT

SEQ ID NO: 2693 - protein, 10 aa, Artificial sequence
  synthetic peptide
EAFVVPYGTP

SEQ ID NO: 2694 - protein, 10 aa, Artificial sequence
  synthetic peptide
AFVVPYGTPL

SEQ ID NO: 2695 - protein, 10 aa, Artificial sequence
  synthetic peptide
FVVPYGTPLS

SEQ ID NO: 2696 - protein, 10 aa, Artificial sequence
  synthetic peptide
VVPYGTPLSV

SEQ ID NO: 2697 - protein, 10 aa, Artificial sequence
  synthetic peptide
VPYGTPLSVN

SEQ ID NO: 2698 - protein, 10 aa, Artificial sequence
  synthetic peptide
PYGTPLSVNF

SEQ ID NO: 2699 - protein, 10 aa, Artificial sequence
  synthetic peptide
YGTPLSVNFG

SEQ ID NO: 2700 - protein, 10 aa, Artificial sequence
  synthetic peptide
GTPLSVNFGP

SEQ ID NO: 2701 - protein, 10 aa, Artificial sequence
  synthetic peptide
TPLSVNFGPT

SEQ ID NO: 2702 - protein, 10 aa, Artificial sequence
  synthetic peptide
PLSVNFGPTV

SEQ ID NO: 2703 - protein, 10 aa, Artificial sequence
  synthetic peptide
LSVNFGPTVD

SEQ ID NO: 2704 - protein, 10 aa, Artificial sequence
  synthetic peptide
SVNFGPTVDG

SEQ ID NO: 2705 - protein, 10 aa, Artificial sequence
  synthetic peptide
VNFGPTVDGD

SEQ ID NO: 2706 - protein, 10 aa, Artificial sequence
  synthetic peptide
NFGPTVDGDF

SEQ ID NO: 2707 - protein, 10 aa, Artificial sequence
  synthetic peptide
FGPTVDGDFL

SEQ ID NO: 2708 - protein, 10 aa, Artificial sequence
  synthetic peptide
GPTVDGDFLT

SEQ ID NO: 2709 - protein, 10 aa, Artificial sequence
  synthetic peptide
PTVDGDFLTD

SEQ ID NO: 2710 - protein, 10 aa, Artificial sequence
  synthetic peptide
TVDGDFLTDM

SEQ ID NO: 2711 - protein, 10 aa, Artificial sequence
  synthetic peptide
VDGDFLTDMP

SEQ ID NO: 2712 - protein, 10 aa, Artificial sequence
  synthetic peptide
DGDFLTDMPD

SEQ ID NO: 2713 - protein, 10 aa, Artificial sequence
  synthetic peptide
GDFLTDMPDI

SEQ ID NO: 2714 - protein, 10 aa, Artificial sequence
  synthetic peptide
DFLTDMPDIL

SEQ ID NO: 2715 - protein, 10 aa, Artificial sequence
  synthetic peptide
FLTDMPDILL

SEQ ID NO: 2716 - protein, 10 aa, Artificial sequence
  synthetic peptide
LTDMPDILLE

SEQ ID NO: 2717 - protein, 10 aa, Artificial sequence
  synthetic peptide
TDMPDILLEL

SEQ ID NO: 2718 - protein, 10 aa, Artificial sequence
  synthetic peptide
DMPDILLELG

SEQ ID NO: 2719 - protein, 10 aa, Artificial sequence
  synthetic peptide
MPDILLELGQ

SEQ ID NO: 2720 - protein, 10 aa, Artificial sequence
  synthetic peptide
PDILLELGQF

SEQ ID NO: 2721 - protein, 10 aa, Artificial sequence
  synthetic peptide
DILLELGQFK

SEQ ID NO: 2722 - protein, 10 aa, Artificial sequence
  synthetic peptide
ILLELGQFKK

SEQ ID NO: 2723 - protein, 10 aa, Artificial sequence
  synthetic peptide
LLELGQFKKT

SEQ ID NO: 2724 - protein, 10 aa, Artificial sequence
  synthetic peptide
LELGQFKKTQ

SEQ ID NO: 2725 - protein, 10 aa, Artificial sequence
  synthetic peptide
ELGQFKKTQI

SEQ ID NO: 2726 - protein, 10 aa, Artificial sequence
  synthetic peptide
LGQFKKTQIL

SEQ ID NO: 2727 - protein, 10 aa, Artificial sequence
  synthetic peptide
GQFKKTQILV

SEQ ID NO: 2728 - protein, 10 aa, Artificial sequence
  synthetic peptide
QFKKTQILVG

SEQ ID NO: 2729 - protein, 10 aa, Artificial sequence
  synthetic peptide
FKKTQILVGV

SEQ ID NO: 2730 - protein, 10 aa, Artificial sequence
  synthetic peptide
KKTQILVGVN

SEQ ID NO: 2731 - protein, 10 aa, Artificial sequence
  synthetic peptide
KTQILVGVNK

SEQ ID NO: 2732 - protein, 10 aa, Artificial sequence
  synthetic peptide
TQILVGVNKD

SEQ ID NO: 2733 - protein, 10 aa, Artificial sequence
  synthetic peptide
QILVGVNKDE

SEQ ID NO: 2734 - protein, 10 aa, Artificial sequence
  synthetic peptide
ILVGVNKDEG

SEQ ID NO: 2735 - protein, 10 aa, Artificial sequence
  synthetic peptide
LVGVNKDEGT

SEQ ID NO: 2736 - protein, 10 aa, Artificial sequence
  synthetic peptide
VGVNKDEGTA

SEQ ID NO: 2737 - protein, 10 aa, Artificial sequence
  synthetic peptide
GVNKDEGTAF

SEQ ID NO: 2738 - protein, 10 aa, Artificial sequence
  synthetic peptide
VNKDEGTAFL

SEQ ID NO: 2739 - protein, 10 aa, Artificial sequence
  synthetic peptide
NKDEGTAFLV

SEQ ID NO: 2740 - protein, 10 aa, Artificial sequence
  synthetic peptide
KDEGTAFLVY

SEQ ID NO: 2741 - protein, 10 aa, Artificial sequence
  synthetic peptide
DEGTAFLVYG

SEQ ID NO: 2742 - protein, 10 aa, Artificial sequence
  synthetic peptide
EGTAFLVYGA

SEQ ID NO: 2743 - protein, 10 aa, Artificial sequence
  synthetic peptide
GTAFLVYGAP

SEQ ID NO: 2744 - protein, 10 aa, Artificial sequence
  synthetic peptide
TAFLVYGAPG

SEQ ID NO: 2745 - protein, 10 aa, Artificial sequence
  synthetic peptide
AFLVYGAPGF

SEQ ID NO: 2746 - protein, 10 aa, Artificial sequence
  synthetic peptide
FLVYGAPGFS

SEQ ID NO: 2747 - protein, 10 aa, Artificial sequence
  synthetic peptide
LVYGAPGFSK

SEQ ID NO: 2748 - protein, 10 aa, Artificial sequence
  synthetic peptide
VYGAPGFSKD

SEQ ID NO: 2749 - protein, 10 aa, Artificial sequence
  synthetic peptide
YGAPGFSKDN

SEQ ID NO: 2750 - protein, 10 aa, Artificial sequence
  synthetic peptide
GAPGFSKDNN

SEQ ID NO: 2751 - protein, 10 aa, Artificial sequence
  synthetic peptide
APGFSKDNNS

SEQ ID NO: 2752 - protein, 10 aa, Artificial sequence
  synthetic peptide
PGFSKDNNSI

SEQ ID NO: 2753 - protein, 10 aa, Artificial sequence
  synthetic peptide
GFSKDNNSII

SEQ ID NO: 2754 - protein, 10 aa, Artificial sequence
  synthetic peptide
FSKDNNSIIT

SEQ ID NO: 2755 - protein, 10 aa, Artificial sequence
  synthetic peptide
SKDNNSIITR

SEQ ID NO: 2756 - protein, 10 aa, Artificial sequence
  synthetic peptide
KDNNSIITRK

SEQ ID NO: 2757 - protein, 10 aa, Artificial sequence
  synthetic peptide
DNNSIITRKE

SEQ ID NO: 2758 - protein, 10 aa, Artificial sequence
  synthetic peptide
NNSIITRKEF

SEQ ID NO: 2759 - protein, 10 aa, Artificial sequence
  synthetic peptide
NSIITRKEFQ

SEQ ID NO: 2760 - protein, 10 aa, Artificial sequence
  synthetic peptide
SIITRKEFQE

SEQ ID NO: 2761 - protein, 10 aa, Artificial sequence
  synthetic peptide
IITRKEFQEG

SEQ ID NO: 2762 - protein, 10 aa, Artificial sequence
  synthetic peptide
ITRKEFQEGL

SEQ ID NO: 2763 - protein, 10 aa, Artificial sequence
  synthetic peptide
TRKEFQEGLK

SEQ ID NO: 2764 - protein, 10 aa, Artificial sequence
  synthetic peptide
RKEFQEGLKI

SEQ ID NO: 2765 - protein, 10 aa, Artificial sequence
  synthetic peptide
KEFQEGLKIF

SEQ ID NO: 2766 - protein, 10 aa, Artificial sequence
  synthetic peptide
EFQEGLKIFF

SEQ ID NO: 2767 - protein, 10 aa, Artificial sequence
  synthetic peptide
FQEGLKIFFP

SEQ ID NO: 2768 - protein, 10 aa, Artificial sequence
  synthetic peptide
QEGLKIFFPG

SEQ ID NO: 2769 - protein, 10 aa, Artificial sequence
  synthetic peptide
EGLKIFFPGV

SEQ ID NO: 2770 - protein, 10 aa, Artificial sequence
  synthetic peptide
GLKIFFPGVS

SEQ ID NO: 2771 - protein, 10 aa, Artificial sequence
  synthetic peptide
LKIFFPGVSE

SEQ ID NO: 2772 - protein, 10 aa, Artificial sequence
  synthetic peptide
KIFFPGVSEF

SEQ ID NO: 2773 - protein, 10 aa, Artificial sequence
  synthetic peptide
IFFPGVSEFG

SEQ ID NO: 2774 - protein, 10 aa, Artificial sequence
  synthetic peptide
FFPGVSEFGK

SEQ ID NO: 2775 - protein, 10 aa, Artificial sequence
  synthetic peptide
FPGVSEFGKE

SEQ ID NO: 2776 - protein, 10 aa, Artificial sequence
  synthetic peptide
PGVSEFGKES

SEQ ID NO: 2777 - protein, 10 aa, Artificial sequence
  synthetic peptide
GVSEFGKESI

SEQ ID NO: 2778 - protein, 10 aa, Artificial sequence
  synthetic peptide
VSEFGKESIL

SEQ ID NO: 2779 - protein, 10 aa, Artificial sequence
  synthetic peptide
SEFGKESILF

SEQ ID NO: 2780 - protein, 10 aa, Artificial sequence
  synthetic peptide
EFGKESILFH

SEQ ID NO: 2781 - protein, 10 aa, Artificial sequence
  synthetic peptide
FGKESILFHY

SEQ ID NO: 2782 - protein, 10 aa, Artificial sequence
  synthetic peptide
GKESILFHYT

SEQ ID NO: 2783 - protein, 10 aa, Artificial sequence
  synthetic peptide
KESILFHYTD

SEQ ID NO: 2784 - protein, 10 aa, Artificial sequence
  synthetic peptide
ESILFHYTDW

SEQ ID NO: 2785 - protein, 10 aa, Artificial sequence
  synthetic peptide
SILFHYTDWV

SEQ ID NO: 2786 - protein, 10 aa, Artificial sequence
  synthetic peptide
ILFHYTDWVD

SEQ ID NO: 2787 - protein, 10 aa, Artificial sequence
  synthetic peptide
LFHYTDWVDD

SEQ ID NO: 2788 - protein, 10 aa, Artificial sequence
  synthetic peptide
FHYTDWVDDQ

SEQ ID NO: 2789 - protein, 10 aa, Artificial sequence
  synthetic peptide
HYTDWVDDQR

SEQ ID NO: 2790 - protein, 10 aa, Artificial sequence
  synthetic peptide
YTDWVDDQRP

SEQ ID NO: 2791 - protein, 10 aa, Artificial sequence
  synthetic peptide
TDWVDDQRPE

SEQ ID NO: 2792 - protein, 10 aa, Artificial sequence
  synthetic peptide
DWVDDQRPEN

SEQ ID NO: 2793 - protein, 10 aa, Artificial sequence
  synthetic peptide
WVDDQRPENY

SEQ ID NO: 2794 - protein, 10 aa, Artificial sequence
  synthetic peptide
VDDQRPENYR

SEQ ID NO: 2795 - protein, 10 aa, Artificial sequence
  synthetic peptide
DDQRPENYRE

SEQ ID NO: 2796 - protein, 10 aa, Artificial sequence
  synthetic peptide
DQRPENYREA

SEQ ID NO: 2797 - protein, 10 aa, Artificial sequence
  synthetic peptide
QRPENYREAL

SEQ ID NO: 2798 - protein, 10 aa, Artificial sequence
  synthetic peptide
RPENYREALG

SEQ ID NO: 2799 - protein, 10 aa, Artificial sequence
  synthetic peptide
PENYREALGD

SEQ ID NO: 2800 - protein, 10 aa, Artificial sequence
  synthetic peptide
ENYREALGDV

SEQ ID NO: 2801 - protein, 10 aa, Artificial sequence
  synthetic peptide
NYREALGDVV

SEQ ID NO: 2802 - protein, 10 aa, Artificial sequence
  synthetic peptide
YREALGDVVG

SEQ ID NO: 2803 - protein, 10 aa, Artificial sequence
  synthetic peptide
REALGDVVGD

SEQ ID NO: 2804 - protein, 10 aa, Artificial sequence
  synthetic peptide
EALGDVVGDY

SEQ ID NO: 2805 - protein, 10 aa, Artificial sequence
  synthetic peptide
ALGDVVGDYN

SEQ ID NO: 2806 - protein, 10 aa, Artificial sequence
  synthetic peptide
LGDVVGDYNF

SEQ ID NO: 2807 - protein, 10 aa, Artificial sequence
  synthetic peptide
GDVVGDYNFI

SEQ ID NO: 2808 - protein, 10 aa, Artificial sequence
  synthetic peptide
DVVGDYNFIC

SEQ ID NO: 2809 - protein, 10 aa, Artificial sequence
  synthetic peptide
VVGDYNFICP

SEQ ID NO: 2810 - protein, 10 aa, Artificial sequence
  synthetic peptide
VGDYNFICPA

SEQ ID NO: 2811 - protein, 10 aa, Artificial sequence
  synthetic peptide
GDYNFICPAL

SEQ ID NO: 2812 - protein, 10 aa, Artificial sequence
  synthetic peptide
DYNFICPALE

SEQ ID NO: 2813 - protein, 10 aa, Artificial sequence
  synthetic peptide
YNFICPALEF

SEQ ID NO: 2814 - protein, 10 aa, Artificial sequence
  synthetic peptide
NFICPALEFT

SEQ ID NO: 2815 - protein, 10 aa, Artificial sequence
  synthetic peptide
FICPALEFTK

SEQ ID NO: 2816 - protein, 10 aa, Artificial sequence
  synthetic peptide
ICPALEFTKK

SEQ ID NO: 2817 - protein, 10 aa, Artificial sequence
  synthetic peptide
CPALEFTKKF

SEQ ID NO: 2818 - protein, 10 aa, Artificial sequence
  synthetic peptide
PALEFTKKFS

SEQ ID NO: 2819 - protein, 10 aa, Artificial sequence
  synthetic peptide
ALEFTKKFSE

SEQ ID NO: 2820 - protein, 10 aa, Artificial sequence
  synthetic peptide
LEFTKKFSEW

SEQ ID NO: 2821 - protein, 10 aa, Artificial sequence
  synthetic peptide
EFTKKFSEWG

SEQ ID NO: 2822 - protein, 10 aa, Artificial sequence
  synthetic peptide
FTKKFSEWGN

SEQ ID NO: 2823 - protein, 10 aa, Artificial sequence
  synthetic peptide
TKKFSEWGNN

SEQ ID NO: 2824 - protein, 10 aa, Artificial sequence
  synthetic peptide
KKFSEWGNNA

SEQ ID NO: 2825 - protein, 10 aa, Artificial sequence
  synthetic peptide
KFSEWGNNAF

SEQ ID NO: 2826 - protein, 10 aa, Artificial sequence
  synthetic peptide
FSEWGNNAFF

SEQ ID NO: 2827 - protein, 10 aa, Artificial sequence
  synthetic peptide
SEWGNNAFFY

SEQ ID NO: 2828 - protein, 10 aa, Artificial sequence
  synthetic peptide
EWGNNAFFYY

SEQ ID NO: 2829 - protein, 10 aa, Artificial sequence
  synthetic peptide
WGNNAFFYYF

SEQ ID NO: 2830 - protein, 10 aa, Artificial sequence
  synthetic peptide
GNNAFFYYFE

SEQ ID NO: 2831 - protein, 10 aa, Artificial sequence
  synthetic peptide
NNAFFYYFEH

SEQ ID NO: 2832 - protein, 10 aa, Artificial sequence
  synthetic peptide
NAFFYYFEHR

SEQ ID NO: 2833 - protein, 10 aa, Artificial sequence
  synthetic peptide
AFFYYFEHRS

SEQ ID NO: 2834 - protein, 10 aa, Artificial sequence
  synthetic peptide
FFYYFEHRSS

SEQ ID NO: 2835 - protein, 10 aa, Artificial sequence
  synthetic peptide
FYYFEHRSSK

SEQ ID NO: 2836 - protein, 10 aa, Artificial sequence
  synthetic peptide
YYFEHRSSKL

SEQ ID NO: 2837 - protein, 10 aa, Artificial sequence
  synthetic peptide
YFEHRSSKLP

SEQ ID NO: 2838 - protein, 10 aa, Artificial sequence
  synthetic peptide
FEHRSSKLPW

SEQ ID NO: 2839 - protein, 10 aa, Artificial sequence
  synthetic peptide
EHRSSKLPWP

SEQ ID NO: 2840 - protein, 10 aa, Artificial sequence
  synthetic peptide
HRSSKLPWPE

SEQ ID NO: 2841 - protein, 10 aa, Artificial sequence
  synthetic peptide
RSSKLPWPEW

SEQ ID NO: 2842 - protein, 10 aa, Artificial sequence
  synthetic peptide
SSKLPWPEWM

SEQ ID NO: 2843 - protein, 10 aa, Artificial sequence
  synthetic peptide
SKLPWPEWMG

SEQ ID NO: 2844 - protein, 10 aa, Artificial sequence
  synthetic peptide
KLPWPEWMGV

SEQ ID NO: 2845 - protein, 10 aa, Artificial sequence
  synthetic peptide
LPWPEWMGVM

SEQ ID NO: 2846 - protein, 10 aa, Artificial sequence
  synthetic peptide
PWPEWMGVMH

SEQ ID NO: 2847 - protein, 10 aa, Artificial sequence
  synthetic peptide
WPEWMGVMHG

SEQ ID NO: 2848 - protein, 10 aa, Artificial sequence
  synthetic peptide
PEWMGVMHGY

SEQ ID NO: 2849 - protein, 10 aa, Artificial sequence
  synthetic peptide
EWMGVMHGYE

SEQ ID NO: 2850 - protein, 10 aa, Artificial sequence
  synthetic peptide
WMGVMHGYEI

SEQ ID NO: 2851 - protein, 10 aa, Artificial sequence
  synthetic peptide
MGVMHGYEIE

SEQ ID NO: 2852 - protein, 10 aa, Artificial sequence
  synthetic peptide
GVMHGYEIEF

SEQ ID NO: 2853 - protein, 10 aa, Artificial sequence
  synthetic peptide
VMHGYEIEFV

SEQ ID NO: 2854 - protein, 10 aa, Artificial sequence
  synthetic peptide
MHGYEIEFVF

SEQ ID NO: 2855 - protein, 10 aa, Artificial sequence
  synthetic peptide
HGYEIEFVFG

SEQ ID NO: 2856 - protein, 10 aa, Artificial sequence
  synthetic peptide
GYEIEFVFGL

SEQ ID NO: 2857 - protein, 10 aa, Artificial sequence
  synthetic peptide
YEIEFVFGLP

SEQ ID NO: 2858 - protein, 10 aa, Artificial sequence
  synthetic peptide
EIEFVFGLPL

SEQ ID NO: 2859 - protein, 10 aa, Artificial sequence
  synthetic peptide
IEFVFGLPLE

SEQ ID NO: 2860 - protein, 10 aa, Artificial sequence
  synthetic peptide
EFVFGLPLER

SEQ ID NO: 2861 - protein, 10 aa, Artificial sequence
  synthetic peptide
FVFGLPLERR

SEQ ID NO: 2862 - protein, 10 aa, Artificial sequence
  synthetic peptide
VFGLPLERRD

SEQ ID NO: 2863 - protein, 10 aa, Artificial sequence
  synthetic peptide
FGLPLERRDN

SEQ ID NO: 2864 - protein, 10 aa, Artificial sequence
  synthetic peptide
GLPLERRDNY

SEQ ID NO: 2865 - protein, 10 aa, Artificial sequence
  synthetic peptide
LPLERRDNYT

SEQ ID NO: 2866 - protein, 10 aa, Artificial sequence
  synthetic peptide
PLERRDNYTK

SEQ ID NO: 2867 - protein, 10 aa, Artificial sequence
  synthetic peptide
LERRDNYTKA

SEQ ID NO: 2868 - protein, 10 aa, Artificial sequence
  synthetic peptide
ERRDNYTKAE

SEQ ID NO: 2869 - protein, 10 aa, Artificial sequence
  synthetic peptide
RRDNYTKAEE

SEQ ID NO: 2870 - protein, 10 aa, Artificial sequence
  synthetic peptide
RDNYTKAEEI

SEQ ID NO: 2871 - protein, 10 aa, Artificial sequence
  synthetic peptide
DNYTKAEEIL

SEQ ID NO: 2872 - protein, 10 aa, Artificial sequence
  synthetic peptide
NYTKAEEILS

SEQ ID NO: 2873 - protein, 10 aa, Artificial sequence
  synthetic peptide
YTKAEEILSR

SEQ ID NO: 2874 - protein, 10 aa, Artificial sequence
  synthetic peptide
TKAEEILSRS

SEQ ID NO: 2875 - protein, 10 aa, Artificial sequence
  synthetic peptide
KAEEILSRSI

SEQ ID NO: 2876 - protein, 10 aa, Artificial sequence
  synthetic peptide
AEEILSRSIV

SEQ ID NO: 2877 - protein, 10 aa, Artificial sequence
  synthetic peptide
EEILSRSIVK

SEQ ID NO: 2878 - protein, 10 aa, Artificial sequence
  synthetic peptide
EILSRSIVKR

SEQ ID NO: 2879 - protein, 10 aa, Artificial sequence
  synthetic peptide
ILSRSIVKRW

SEQ ID NO: 2880 - protein, 10 aa, Artificial sequence
  synthetic peptide
LSRSIVKRWA

SEQ ID NO: 2881 - protein, 10 aa, Artificial sequence
  synthetic peptide
SRSIVKRWAN

SEQ ID NO: 2882 - protein, 10 aa, Artificial sequence
  synthetic peptide
RSIVKRWANF

SEQ ID NO: 2883 - protein, 10 aa, Artificial sequence
  synthetic peptide
SIVKRWANFA

SEQ ID NO: 2884 - protein, 10 aa, Artificial sequence
  synthetic peptide
IVKRWANFAK

SEQ ID NO: 2885 - protein, 10 aa, Artificial sequence
  synthetic peptide
VKRWANFAKY

SEQ ID NO: 2886 - protein, 10 aa, Artificial sequence
  synthetic peptide
KRWANFAKYG

SEQ ID NO: 2887 - protein, 10 aa, Artificial sequence
  synthetic peptide
RWANFAKYGN

SEQ ID NO: 2888 - protein, 10 aa, Artificial sequence
  synthetic peptide
WANFAKYGNP

SEQ ID NO: 2889 - protein, 10 aa, Artificial sequence
  synthetic peptide
ANFAKYGNPN

SEQ ID NO: 2890 - protein, 10 aa, Artificial sequence
  synthetic peptide
NFAKYGNPNE

SEQ ID NO: 2891 - protein, 10 aa, Artificial sequence
  synthetic peptide
FAKYGNPNET

SEQ ID NO: 2892 - protein, 10 aa, Artificial sequence
  synthetic peptide
AKYGNPNETQ

SEQ ID NO: 2893 - protein, 10 aa, Artificial sequence
  synthetic peptide
KYGNPNETQN

SEQ ID NO: 2894 - protein, 10 aa, Artificial sequence
  synthetic peptide
YGNPNETQNN

SEQ ID NO: 2895 - protein, 10 aa, Artificial sequence
  synthetic peptide
GNPNETQNNS

SEQ ID NO: 2896 - protein, 10 aa, Artificial sequence
  synthetic peptide
NPNETQNNST

SEQ ID NO: 2897 - protein, 10 aa, Artificial sequence
  synthetic peptide
PNETQNNSTS

SEQ ID NO: 2898 - protein, 10 aa, Artificial sequence
  synthetic peptide
NETQNNSTSW

SEQ ID NO: 2899 - protein, 10 aa, Artificial sequence
  synthetic peptide
ETQNNSTSWP

SEQ ID NO: 2900 - protein, 10 aa, Artificial sequence
  synthetic peptide
TQNNSTSWPV

SEQ ID NO: 2901 - protein, 10 aa, Artificial sequence
  synthetic peptide
QNNSTSWPVF

SEQ ID NO: 2902 - protein, 10 aa, Artificial sequence
  synthetic peptide
NNSTSWPVFK

SEQ ID NO: 2903 - protein, 10 aa, Artificial sequence
  synthetic peptide
NSTSWPVFKS

SEQ ID NO: 2904 - protein, 10 aa, Artificial sequence
  synthetic peptide
STSWPVFKST

SEQ ID NO: 2905 - protein, 10 aa, Artificial sequence
  synthetic peptide
TSWPVFKSTE

SEQ ID NO: 2906 - protein, 10 aa, Artificial sequence
  synthetic peptide
SWPVFKSTEQ

SEQ ID NO: 2907 - protein, 10 aa, Artificial sequence
  synthetic peptide
WPVFKSTEQK

SEQ ID NO: 2908 - protein, 10 aa, Artificial sequence
  synthetic peptide
PVFKSTEQKY

SEQ ID NO: 2909 - protein, 10 aa, Artificial sequence
  synthetic peptide
VFKSTEQKYL

SEQ ID NO: 2910 - protein, 10 aa, Artificial sequence
  synthetic peptide
FKSTEQKYLT

SEQ ID NO: 2911 - protein, 10 aa, Artificial sequence
  synthetic peptide
KSTEQKYLTL

SEQ ID NO: 2912 - protein, 10 aa, Artificial sequence
  synthetic peptide
STEQKYLTLN

SEQ ID NO: 2913 - protein, 10 aa, Artificial sequence
  synthetic peptide
TEQKYLTLNT

SEQ ID NO: 2914 - protein, 10 aa, Artificial sequence
  synthetic peptide
EQKYLTLNTE

SEQ ID NO: 2915 - protein, 10 aa, Artificial sequence
  synthetic peptide
QKYLTLNTES

SEQ ID NO: 2916 - protein, 10 aa, Artificial sequence
  synthetic peptide
KYLTLNTEST

SEQ ID NO: 2917 - protein, 10 aa, Artificial sequence
  synthetic peptide
YLTLNTESTR

SEQ ID NO: 2918 - protein, 10 aa, Artificial sequence
  synthetic peptide
LTLNTESTRI

SEQ ID NO: 2919 - protein, 10 aa, Artificial sequence
  synthetic peptide
TLNTESTRIM

SEQ ID NO: 2920 - protein, 10 aa, Artificial sequence
  synthetic peptide
LNTESTRIMT

SEQ ID NO: 2921 - protein, 10 aa, Artificial sequence
  synthetic peptide
NTESTRIMTK

SEQ ID NO: 2922 - protein, 10 aa, Artificial sequence
  synthetic peptide
TESTRIMTKL

SEQ ID NO: 2923 - protein, 10 aa, Artificial sequence
  synthetic peptide
ESTRIMTKLR

SEQ ID NO: 2924 - protein, 10 aa, Artificial sequence
  synthetic peptide
STRIMTKLRA

SEQ ID NO: 2925 - protein, 10 aa, Artificial sequence
  synthetic peptide
TRIMTKLRAQ

SEQ ID NO: 2926 - protein, 10 aa, Artificial sequence
  synthetic peptide
RIMTKLRAQQ

SEQ ID NO: 2927 - protein, 10 aa, Artificial sequence
  synthetic peptide
IMTKLRAQQC

SEQ ID NO: 2928 - protein, 10 aa, Artificial sequence
  synthetic peptide
MTKLRAQQCR

SEQ ID NO: 2929 - protein, 10 aa, Artificial sequence
  synthetic peptide
TKLRAQQCRF

SEQ ID NO: 2930 - protein, 10 aa, Artificial sequence
  synthetic peptide
KLRAQQCRFW

SEQ ID NO: 2931 - protein, 10 aa, Artificial sequence
  synthetic peptide
LRAQQCRFWT

SEQ ID NO: 2932 - protein, 10 aa, Artificial sequence
  synthetic peptide
RAQQCRFWTS

SEQ ID NO: 2933 - protein, 10 aa, Artificial sequence
  synthetic peptide
AQQCRFWTSF

SEQ ID NO: 2934 - protein, 10 aa, Artificial sequence
  synthetic peptide
QQCRFWTSFF

SEQ ID NO: 2935 - protein, 10 aa, Artificial sequence
  synthetic peptide
QCRFWTSFFP

SEQ ID NO: 2936 - protein, 10 aa, Artificial sequence
  synthetic peptide
CRFWTSFFPK

SEQ ID NO: 2937 - protein, 10 aa, Artificial sequence
  synthetic peptide
RFWTSFFPKV

SEQ ID NO: 2938 - protein, 10 aa, Artificial sequence
  synthetic peptide
FWTSFFPKVL

SEQ ID NO: 2939 - protein, 10 aa, Artificial sequence
  synthetic peptide
WTSFFPKVLE

SEQ ID NO: 2940 - protein, 10 aa, Artificial sequence
  synthetic peptide
TSFFPKVLEM

SEQ ID NO: 2941 - protein, 10 aa, Artificial sequence
  synthetic peptide
SFFPKVLEMT

SEQ ID NO: 2942 - protein, 10 aa, Artificial sequence
  synthetic peptide
FFPKVLEMTG

SEQ ID NO: 2943 - protein, 10 aa, Artificial sequence
  synthetic peptide
FPKVLEMTGN

SEQ ID NO: 2944 - protein, 10 aa, Artificial sequence
  synthetic peptide
PKVLEMTGNI

SEQ ID NO: 2945 - protein, 10 aa, Artificial sequence
  synthetic peptide
KVLEMTGNID

SEQ ID NO: 2946 - protein, 10 aa, Artificial sequence
  synthetic peptide
VLEMTGNIDE

SEQ ID NO: 2947 - protein, 10 aa, Artificial sequence
  synthetic peptide
LEMTGNIDEA

SEQ ID NO: 2948 - protein, 10 aa, Artificial sequence
  synthetic peptide
EMTGNIDEAE

SEQ ID NO: 2949 - protein, 10 aa, Artificial sequence
  synthetic peptide
MTGNIDEAEW

SEQ ID NO: 2950 - protein, 10 aa, Artificial sequence
  synthetic peptide
TGNIDEAEWE

SEQ ID NO: 2951 - protein, 10 aa, Artificial sequence
  synthetic peptide
GNIDEAEWEW

SEQ ID NO: 2952 - protein, 10 aa, Artificial sequence
  synthetic peptide
NIDEAEWEWK

SEQ ID NO: 2953 - protein, 10 aa, Artificial sequence
  synthetic peptide
IDEAEWEWKA

SEQ ID NO: 2954 - protein, 10 aa, Artificial sequence
  synthetic peptide
DEAEWEWKAG

SEQ ID NO: 2955 - protein, 10 aa, Artificial sequence
  synthetic peptide
EAEWEWKAGF

SEQ ID NO: 2956 - protein, 10 aa, Artificial sequence
  synthetic peptide
AEWEWKAGFH

SEQ ID NO: 2957 - protein, 10 aa, Artificial sequence
  synthetic peptide
EWEWKAGFHR

SEQ ID NO: 2958 - protein, 10 aa, Artificial sequence
  synthetic peptide
WEWKAGFHRW

SEQ ID NO: 2959 - protein, 10 aa, Artificial sequence
  synthetic peptide
EWKAGFHRWN

SEQ ID NO: 2960 - protein, 10 aa, Artificial sequence
  synthetic peptide
WKAGFHRWNN

SEQ ID NO: 2961 - protein, 10 aa, Artificial sequence
  synthetic peptide
KAGFHRWNNY

SEQ ID NO: 2962 - protein, 10 aa, Artificial sequence
  synthetic peptide
AGFHRWNNYM

SEQ ID NO: 2963 - protein, 10 aa, Artificial sequence
  synthetic peptide
GFHRWNNYMM

SEQ ID NO: 2964 - protein, 10 aa, Artificial sequence
  synthetic peptide
FHRWNNYMMD

SEQ ID NO: 2965 - protein, 10 aa, Artificial sequence
  synthetic peptide
HRWNNYMMDW

SEQ ID NO: 2966 - protein, 10 aa, Artificial sequence
  synthetic peptide
RWNNYMMDWK

SEQ ID NO: 2967 - protein, 10 aa, Artificial sequence
  synthetic peptide
WNNYMMDWKN

SEQ ID NO: 2968 - protein, 10 aa, Artificial sequence
  synthetic peptide
NNYMMDWKNQ

SEQ ID NO: 2969 - protein, 10 aa, Artificial sequence
  synthetic peptide
NYMMDWKNQF

SEQ ID NO: 2970 - protein, 10 aa, Artificial sequence
  synthetic peptide
YMMDWKNQFN

SEQ ID NO: 2971 - protein, 10 aa, Artificial sequence
  synthetic peptide
MMDWKNQFND

SEQ ID NO: 2972 - protein, 10 aa, Artificial sequence
  synthetic peptide
MDWKNQFNDY

SEQ ID NO: 2973 - protein, 10 aa, Artificial sequence
  synthetic peptide
DWKNQFNDYT

SEQ ID NO: 2974 - protein, 10 aa, Artificial sequence
  synthetic peptide
WKNQFNDYTS

SEQ ID NO: 2975 - protein, 10 aa, Artificial sequence
  synthetic peptide
KNQFNDYTSK

SEQ ID NO: 2976 - protein, 10 aa, Artificial sequence
  synthetic peptide
NQFNDYTSKK

SEQ ID NO: 2977 - protein, 10 aa, Artificial sequence
  synthetic peptide
QFNDYTSKKE

SEQ ID NO: 2978 - protein, 10 aa, Artificial sequence
  synthetic peptide
FNDYTSKKES

SEQ ID NO: 2979 - protein, 10 aa, Artificial sequence
  synthetic peptide
NDYTSKKESC

SEQ ID NO: 2980 - protein, 10 aa, Artificial sequence
  synthetic peptide
DYTSKKESCV

SEQ ID NO: 2981 - protein, 10 aa, Artificial sequence
  synthetic peptide
YTSKKESCVG

SEQ ID NO: 2982 - protein, 10 aa, Artificial sequence
  synthetic peptide
TSKKESCVGL

SEQ ID NO: 2983 - protein, 11 aa, Artificial sequence
  synthetic peptide
MHSKVTIICIR

SEQ ID NO: 2984 - protein, 11 aa, Artificial sequence
  synthetic peptide
HSKVTIICIRF

SEQ ID NO: 2985 - protein, 11 aa, Artificial sequence
  synthetic peptide
SKVTIICIRFL

SEQ ID NO: 2986 - protein, 11 aa, Artificial sequence
  synthetic peptide
KVTIICIRFLF

SEQ ID NO: 2987 - protein, 11 aa, Artificial sequence
  synthetic peptide
VTIICIRFLFW

SEQ ID NO: 2988 - protein, 11 aa, Artificial sequence
  synthetic peptide
TIICIRFLFWF

SEQ ID NO: 2989 - protein, 11 aa, Artificial sequence
  synthetic peptide
IICIRFLFWFL

SEQ ID NO: 2990 - protein, 11 aa, Artificial sequence
  synthetic peptide
ICIRFLFWFLL

SEQ ID NO: 2991 - protein, 11 aa, Artificial sequence
  synthetic peptide
CIRFLFWFLLL

SEQ ID NO: 2992 - protein, 11 aa, Artificial sequence
  synthetic peptide
IRFLFWFLLLC

SEQ ID NO: 2993 - protein, 11 aa, Artificial sequence
  synthetic peptide
RFLFWFLLLCM

SEQ ID NO: 2994 - protein, 11 aa, Artificial sequence
  synthetic peptide
FLFWFLLLCML

SEQ ID NO: 2995 - protein, 11 aa, Artificial sequence
  synthetic peptide
LFWFLLLCMLI

SEQ ID NO: 2996 - protein, 11 aa, Artificial sequence
  synthetic peptide
FWFLLLCMLIG

SEQ ID NO: 2997 - protein, 11 aa, Artificial sequence
  synthetic peptide
WFLLLCMLIGK

SEQ ID NO: 2998 - protein, 11 aa, Artificial sequence
  synthetic peptide
FLLLCMLIGKS

SEQ ID NO: 2999 - protein, 11 aa, Artificial sequence
  synthetic peptide
LLLCMLIGKSH

SEQ ID NO: 3000 - protein, 11 aa, Artificial sequence
  synthetic peptide
LLCMLIGKSHT

SEQ ID NO: 3001 - protein, 11 aa, Artificial sequence
  synthetic peptide
LCMLIGKSHTE

SEQ ID NO: 3002 - protein, 11 aa, Artificial sequence
  synthetic peptide
CMLIGKSHTED

SEQ ID NO: 3003 - protein, 11 aa, Artificial sequence
  synthetic peptide
MLIGKSHTEDD

SEQ ID NO: 3004 - protein, 11 aa, Artificial sequence
  synthetic peptide
LIGKSHTEDDI

SEQ ID NO: 3005 - protein, 11 aa, Artificial sequence
  synthetic peptide
IGKSHTEDDII

SEQ ID NO: 3006 - protein, 11 aa, Artificial sequence
  synthetic peptide
GKSHTEDDIII

SEQ ID NO: 3007 - protein, 11 aa, Artificial sequence
  synthetic peptide
KSHTEDDIIIA

SEQ ID NO: 3008 - protein, 11 aa, Artificial sequence
  synthetic peptide
SHTEDDIIIAT

SEQ ID NO: 3009 - protein, 11 aa, Artificial sequence
  synthetic peptide
HTEDDIIIATK

SEQ ID NO: 3010 - protein, 11 aa, Artificial sequence
  synthetic peptide
TEDDIIIATKN

SEQ ID NO: 3011 - protein, 11 aa, Artificial sequence
  synthetic peptide
EDDIIIATKNG

SEQ ID NO: 3012 - protein, 11 aa, Artificial sequence
  synthetic peptide
DDIIIATKNGK

SEQ ID NO: 3013 - protein, 11 aa, Artificial sequence
  synthetic peptide
DIIIATKNGKV

SEQ ID NO: 3014 - protein, 11 aa, Artificial sequence
  synthetic peptide
IIIATKNGKVR

SEQ ID NO: 3015 - protein, 11 aa, Artificial sequence
  synthetic peptide
IIATKNGKVRG

SEQ ID NO: 3016 - protein, 11 aa, Artificial sequence
  synthetic peptide
IATKNGKVRGM

SEQ ID NO: 3017 - protein, 11 aa, Artificial sequence
  synthetic peptide
ATKNGKVRGMN

SEQ ID NO: 3018 - protein, 11 aa, Artificial sequence
  synthetic peptide
TKNGKVRGMNL

SEQ ID NO: 3019 - protein, 11 aa, Artificial sequence
  synthetic peptide
KNGKVRGMNLT

SEQ ID NO: 3020 - protein, 11 aa, Artificial sequence
  synthetic peptide
NGKVRGMNLTV

SEQ ID NO: 3021 - protein, 11 aa, Artificial sequence
  synthetic peptide
GKVRGMNLTVF

SEQ ID NO: 3022 - protein, 11 aa, Artificial sequence
  synthetic peptide
KVRGMNLTVFG

SEQ ID NO: 3023 - protein, 11 aa, Artificial sequence
  synthetic peptide
VRGMNLTVFGG

SEQ ID NO: 3024 - protein, 11 aa, Artificial sequence
  synthetic peptide
RGMNLTVFGGT

SEQ ID NO: 3025 - protein, 11 aa, Artificial sequence
  synthetic peptide
GMNLTVFGGTV

SEQ ID NO: 3026 - protein, 11 aa, Artificial sequence
  synthetic peptide
MNLTVFGGTVT

SEQ ID NO: 3027 - protein, 11 aa, Artificial sequence
  synthetic peptide
NLTVFGGTVTA

SEQ ID NO: 3028 - protein, 11 aa, Artificial sequence
  synthetic peptide
LTVFGGTVTAF

SEQ ID NO: 3029 - protein, 11 aa, Artificial sequence
  synthetic peptide
TVFGGTVTAFL

SEQ ID NO: 3030 - protein, 11 aa, Artificial sequence
  synthetic peptide
VFGGTVTAFLG

SEQ ID NO: 3031 - protein, 11 aa, Artificial sequence
  synthetic peptide
FGGTVTAFLGI

SEQ ID NO: 3032 - protein, 11 aa, Artificial sequence
  synthetic peptide
GGTVTAFLGIP

SEQ ID NO: 3033 - protein, 11 aa, Artificial sequence
  synthetic peptide
GTVTAFLGIPY

SEQ ID NO: 3034 - protein, 11 aa, Artificial sequence
  synthetic peptide
TVTAFLGIPYA

SEQ ID NO: 3035 - protein, 11 aa, Artificial sequence
  synthetic peptide
VTAFLGIPYAQ

SEQ ID NO: 3036 - protein, 11 aa, Artificial sequence
  synthetic peptide
TAFLGIPYAQP

SEQ ID NO: 3037 - protein, 11 aa, Artificial sequence
  synthetic peptide
AFLGIPYAQPP

SEQ ID NO: 3038 - protein, 11 aa, Artificial sequence
  synthetic peptide
FLGIPYAQPPL

SEQ ID NO: 3039 - protein, 11 aa, Artificial sequence
  synthetic peptide
LGIPYAQPPLG

SEQ ID NO: 3040 - protein, 11 aa, Artificial sequence
  synthetic peptide
GIPYAQPPLGR

SEQ ID NO: 3041 - protein, 11 aa, Artificial sequence
  synthetic peptide
IPYAQPPLGRL

SEQ ID NO: 3042 - protein, 11 aa, Artificial sequence
  synthetic peptide
PYAQPPLGRLR

SEQ ID NO: 3043 - protein, 11 aa, Artificial sequence
  synthetic peptide
YAQPPLGRLRF

SEQ ID NO: 3044 - protein, 11 aa, Artificial sequence
  synthetic peptide
AQPPLGRLRFK

SEQ ID NO: 3045 - protein, 11 aa, Artificial sequence
  synthetic peptide
QPPLGRLRFKK

SEQ ID NO: 3046 - protein, 11 aa, Artificial sequence
  synthetic peptide
PPLGRLRFKKP

SEQ ID NO: 3047 - protein, 11 aa, Artificial sequence
  synthetic peptide
PLGRLRFKKPQ

SEQ ID NO: 3048 - protein, 11 aa, Artificial sequence
  synthetic peptide
LGRLRFKKPQS

SEQ ID NO: 3049 - protein, 11 aa, Artificial sequence
  synthetic peptide
GRLRFKKPQSL

SEQ ID NO: 3050 - protein, 11 aa, Artificial sequence
  synthetic peptide
RLRFKKPQSLT

SEQ ID NO: 3051 - protein, 11 aa, Artificial sequence
  synthetic peptide
LRFKKPQSLTK

SEQ ID NO: 3052 - protein, 11 aa, Artificial sequence
  synthetic peptide
RFKKPQSLTKW

SEQ ID NO: 3053 - protein, 11 aa, Artificial sequence
  synthetic peptide
FKKPQSLTKWS

SEQ ID NO: 3054 - protein, 11 aa, Artificial sequence
  synthetic peptide
KKPQSLTKWSD

SEQ ID NO: 3055 - protein, 11 aa, Artificial sequence
  synthetic peptide
KPQSLTKWSDI

SEQ ID NO: 3056 - protein, 11 aa, Artificial sequence
  synthetic peptide
PQSLTKWSDIW

SEQ ID NO: 3057 - protein, 11 aa, Artificial sequence
  synthetic peptide
QSLTKWSDIWN

SEQ ID NO: 3058 - protein, 11 aa, Artificial sequence
  synthetic peptide
SLTKWSDIWNA

SEQ ID NO: 3059 - protein, 11 aa, Artificial sequence
  synthetic peptide
LTKWSDIWNAT

SEQ ID NO: 3060 - protein, 11 aa, Artificial sequence
  synthetic peptide
TKWSDIWNATK

SEQ ID NO: 3061 - protein, 11 aa, Artificial sequence
  synthetic peptide
KWSDIWNATKY

SEQ ID NO: 3062 - protein, 11 aa, Artificial sequence
  synthetic peptide
WSDIWNATKYA

SEQ ID NO: 3063 - protein, 11 aa, Artificial sequence
  synthetic peptide
SDIWNATKYAN

SEQ ID NO: 3064 - protein, 11 aa, Artificial sequence
  synthetic peptide
DIWNATKYANS

SEQ ID NO: 3065 - protein, 11 aa, Artificial sequence
  synthetic peptide
IWNATKYANSC

SEQ ID NO: 3066 - protein, 11 aa, Artificial sequence
  synthetic peptide
WNATKYANSCC

SEQ ID NO: 3067 - protein, 11 aa, Artificial sequence
  synthetic peptide
NATKYANSCCQ

SEQ ID NO: 3068 - protein, 11 aa, Artificial sequence
  synthetic peptide
ATKYANSCCQN

SEQ ID NO: 3069 - protein, 11 aa, Artificial sequence
  synthetic peptide
TKYANSCCQNI

SEQ ID NO: 3070 - protein, 11 aa, Artificial sequence
  synthetic peptide
KYANSCCQNID

SEQ ID NO: 3071 - protein, 11 aa, Artificial sequence
  synthetic peptide
YANSCCQNIDQ

SEQ ID NO: 3072 - protein, 11 aa, Artificial sequence
  synthetic peptide
ANSCCQNIDQS

SEQ ID NO: 3073 - protein, 11 aa, Artificial sequence
  synthetic peptide
NSCCQNIDQSF

SEQ ID NO: 3074 - protein, 11 aa, Artificial sequence
  synthetic peptide
SCCQNIDQSFP

SEQ ID NO: 3075 - protein, 11 aa, Artificial sequence
  synthetic peptide
CCQNIDQSFPG

SEQ ID NO: 3076 - protein, 11 aa, Artificial sequence
  synthetic peptide
CQNIDQSFPGF

SEQ ID NO: 3077 - protein, 11 aa, Artificial sequence
  synthetic peptide
QNIDQSFPGFH

SEQ ID NO: 3078 - protein, 11 aa, Artificial sequence
  synthetic peptide
NIDQSFPGFHG

SEQ ID NO: 3079 - protein, 11 aa, Artificial sequence
  synthetic peptide
IDQSFPGFHGS

SEQ ID NO: 3080 - protein, 11 aa, Artificial sequence
  synthetic peptide
DQSFPGFHGSE

SEQ ID NO: 3081 - protein, 11 aa, Artificial sequence
  synthetic peptide
QSFPGFHGSEM

SEQ ID NO: 3082 - protein, 11 aa, Artificial sequence
  synthetic peptide
SFPGFHGSEMW

SEQ ID NO: 3083 - protein, 11 aa, Artificial sequence
  synthetic peptide
FPGFHGSEMWN

SEQ ID NO: 3084 - protein, 11 aa, Artificial sequence
  synthetic peptide
PGFHGSEMWNP

SEQ ID NO: 3085 - protein, 11 aa, Artificial sequence
  synthetic peptide
GFHGSEMWNPN

SEQ ID NO: 3086 - protein, 11 aa, Artificial sequence
  synthetic peptide
FHGSEMWNPNT

SEQ ID NO: 3087 - protein, 11 aa, Artificial sequence
  synthetic peptide
HGSEMWNPNTD

SEQ ID NO: 3088 - protein, 11 aa, Artificial sequence
  synthetic peptide
GSEMWNPNTDL

SEQ ID NO: 3089 - protein, 11 aa, Artificial sequence
  synthetic peptide
SEMWNPNTDLS

SEQ ID NO: 3090 - protein, 11 aa, Artificial sequence
  synthetic peptide
EMWNPNTDLSE

SEQ ID NO: 3091 - protein, 11 aa, Artificial sequence
  synthetic peptide
MWNPNTDLSED

SEQ ID NO: 3092 - protein, 11 aa, Artificial sequence
  synthetic peptide
WNPNTDLSEDC

SEQ ID NO: 3093 - protein, 11 aa, Artificial sequence
  synthetic peptide
NPNTDLSEDCL

SEQ ID NO: 3094 - protein, 11 aa, Artificial sequence
  synthetic peptide
PNTDLSEDCLY

SEQ ID NO: 3095 - protein, 11 aa, Artificial sequence
  synthetic peptide
NTDLSEDCLYL

SEQ ID NO: 3096 - protein, 11 aa, Artificial sequence
  synthetic peptide
TDLSEDCLYLN

SEQ ID NO: 3097 - protein, 11 aa, Artificial sequence
  synthetic peptide
DLSEDCLYLNV

SEQ ID NO: 3098 - protein, 11 aa, Artificial sequence
  synthetic peptide
LSEDCLYLNVW

SEQ ID NO: 3099 - protein, 11 aa, Artificial sequence
  synthetic peptide
SEDCLYLNVWI

SEQ ID NO: 3100 - protein, 11 aa, Artificial sequence
  synthetic peptide
EDCLYLNVWIP

SEQ ID NO: 3101 - protein, 11 aa, Artificial sequence
  synthetic peptide
DCLYLNVWIPA

SEQ ID NO: 3102 - protein, 11 aa, Artificial sequence
  synthetic peptide
CLYLNVWIPAP

SEQ ID NO: 3103 - protein, 11 aa, Artificial sequence
  synthetic peptide
LYLNVWIPAPK

SEQ ID NO: 3104 - protein, 11 aa, Artificial sequence
  synthetic peptide
YLNVWIPAPKP

SEQ ID NO: 3105 - protein, 11 aa, Artificial sequence
  synthetic peptide
LNVWIPAPKPK

SEQ ID NO: 3106 - protein, 11 aa, Artificial sequence
  synthetic peptide
NVWIPAPKPKN

SEQ ID NO: 3107 - protein, 11 aa, Artificial sequence
  synthetic peptide
VWIPAPKPKNA

SEQ ID NO: 3108 - protein, 11 aa, Artificial sequence
  synthetic peptide
WIPAPKPKNAT

SEQ ID NO: 3109 - protein, 11 aa, Artificial sequence
  synthetic peptide
IPAPKPKNATV

SEQ ID NO: 3110 - protein, 11 aa, Artificial sequence
  synthetic peptide
PAPKPKNATVL

SEQ ID NO: 3111 - protein, 11 aa, Artificial sequence
  synthetic peptide
APKPKNATVLI

SEQ ID NO: 3112 - protein, 11 aa, Artificial sequence
  synthetic peptide
PKPKNATVLIW

SEQ ID NO: 3113 - protein, 11 aa, Artificial sequence
  synthetic peptide
KPKNATVLIWI

SEQ ID NO: 3114 - protein, 11 aa, Artificial sequence
  synthetic peptide
PKNATVLIWIY

SEQ ID NO: 3115 - protein, 11 aa, Artificial sequence
  synthetic peptide
KNATVLIWIYG

SEQ ID NO: 3116 - protein, 11 aa, Artificial sequence
  synthetic peptide
NATVLIWIYGG

SEQ ID NO: 3117 - protein, 11 aa, Artificial sequence
  synthetic peptide
ATVLIWIYGGG

SEQ ID NO: 3118 - protein, 11 aa, Artificial sequence
  synthetic peptide
TVLIWIYGGGF

SEQ ID NO: 3119 - protein, 11 aa, Artificial sequence
  synthetic peptide
VLIWIYGGGFQ

SEQ ID NO: 3120 - protein, 11 aa, Artificial sequence
  synthetic peptide
LIWIYGGGFQT

SEQ ID NO: 3121 - protein, 11 aa, Artificial sequence
  synthetic peptide
IWIYGGGFQTG

SEQ ID NO: 3122 - protein, 11 aa, Artificial sequence
  synthetic peptide
WIYGGGFQTGT

SEQ ID NO: 3123 - protein, 11 aa, Artificial sequence
  synthetic peptide
IYGGGFQTGTS

SEQ ID NO: 3124 - protein, 11 aa, Artificial sequence
  synthetic peptide
YGGGFQTGTSS

SEQ ID NO: 3125 - protein, 11 aa, Artificial sequence
  synthetic peptide
GGGFQTGTSSL

SEQ ID NO: 3126 - protein, 11 aa, Artificial sequence
  synthetic peptide
GGFQTGTSSLH

SEQ ID NO: 3127 - protein, 11 aa, Artificial sequence
  synthetic peptide
GFQTGTSSLHV

SEQ ID NO: 3128 - protein, 11 aa, Artificial sequence
  synthetic peptide
FQTGTSSLHVY

SEQ ID NO: 3129 - protein, 11 aa, Artificial sequence
  synthetic peptide
QTGTSSLHVYD

SEQ ID NO: 3130 - protein, 11 aa, Artificial sequence
  synthetic peptide
TGTSSLHVYDG

SEQ ID NO: 3131 - protein, 11 aa, Artificial sequence
  synthetic peptide
GTSSLHVYDGK

SEQ ID NO: 3132 - protein, 11 aa, Artificial sequence
  synthetic peptide
TSSLHVYDGKF

SEQ ID NO: 3133 - protein, 11 aa, Artificial sequence
  synthetic peptide
SSLHVYDGKFL

SEQ ID NO: 3134 - protein, 11 aa, Artificial sequence
  synthetic peptide
SLHVYDGKFLA

SEQ ID NO: 3135 - protein, 11 aa, Artificial sequence
  synthetic peptide
LHVYDGKFLAR

SEQ ID NO: 3136 - protein, 11 aa, Artificial sequence
  synthetic peptide
HVYDGKFLARV

SEQ ID NO: 3137 - protein, 11 aa, Artificial sequence
  synthetic peptide
VYDGKFLARVE

SEQ ID NO: 3138 - protein, 11 aa, Artificial sequence
  synthetic peptide
YDGKFLARVER

SEQ ID NO: 3139 - protein, 11 aa, Artificial sequence
  synthetic peptide
DGKFLARVERV

SEQ ID NO: 3140 - protein, 11 aa, Artificial sequence
  synthetic peptide
GKFLARVERVI

SEQ ID NO: 3141 - protein, 11 aa, Artificial sequence
  synthetic peptide
KFLARVERVIV

SEQ ID NO: 3142 - protein, 11 aa, Artificial sequence
  synthetic peptide
FLARVERVIVV

SEQ ID NO: 3143 - protein, 11 aa, Artificial sequence
  synthetic peptide
LARVERVIVVS

SEQ ID NO: 3144 - protein, 11 aa, Artificial sequence
  synthetic peptide
ARVERVIVVSM

SEQ ID NO: 3145 - protein, 11 aa, Artificial sequence
  synthetic peptide
RVERVIVVSMN

SEQ ID NO: 3146 - protein, 11 aa, Artificial sequence
  synthetic peptide
VERVIVVSMNY

SEQ ID NO: 3147 - protein, 11 aa, Artificial sequence
  synthetic peptide
ERVIVVSMNYR

SEQ ID NO: 3148 - protein, 11 aa, Artificial sequence
  synthetic peptide
RVIVVSMNYRV

SEQ ID NO: 3149 - protein, 11 aa, Artificial sequence
  synthetic peptide
VIVVSMNYRVG

SEQ ID NO: 3150 - protein, 11 aa, Artificial sequence
  synthetic peptide
IVVSMNYRVGA

SEQ ID NO: 3151 - protein, 11 aa, Artificial sequence
  synthetic peptide
VVSMNYRVGAL

SEQ ID NO: 3152 - protein, 11 aa, Artificial sequence
  synthetic peptide
VSMNYRVGALG

SEQ ID NO: 3153 - protein, 11 aa, Artificial sequence
  synthetic peptide
SMNYRVGALGF

SEQ ID NO: 3154 - protein, 11 aa, Artificial sequence
  synthetic peptide
MNYRVGALGFL

SEQ ID NO: 3155 - protein, 11 aa, Artificial sequence
  synthetic peptide
NYRVGALGFLA

SEQ ID NO: 3156 - protein, 11 aa, Artificial sequence
  synthetic peptide
YRVGALGFLAL

SEQ ID NO: 3157 - protein, 11 aa, Artificial sequence
  synthetic peptide
RVGALGFLALP

SEQ ID NO: 3158 - protein, 11 aa, Artificial sequence
  synthetic peptide
VGALGFLALPG

SEQ ID NO: 3159 - protein, 11 aa, Artificial sequence
  synthetic peptide
GALGFLALPGN

SEQ ID NO: 3160 - protein, 11 aa, Artificial sequence
  synthetic peptide
ALGFLALPGNP

SEQ ID NO: 3161 - protein, 11 aa, Artificial sequence
  synthetic peptide
LGFLALPGNPE

SEQ ID NO: 3162 - protein, 11 aa, Artificial sequence
  synthetic peptide
GFLALPGNPEA

SEQ ID NO: 3163 - protein, 11 aa, Artificial sequence
  synthetic peptide
FLALPGNPEAP

SEQ ID NO: 3164 - protein, 11 aa, Artificial sequence
  synthetic peptide
LALPGNPEAPG

SEQ ID NO: 3165 - protein, 11 aa, Artificial sequence
  synthetic peptide
ALPGNPEAPGN

SEQ ID NO: 3166 - protein, 11 aa, Artificial sequence
  synthetic peptide
LPGNPEAPGNM

SEQ ID NO: 3167 - protein, 11 aa, Artificial sequence
  synthetic peptide
PGNPEAPGNMG

SEQ ID NO: 3168 - protein, 11 aa, Artificial sequence
  synthetic peptide
GNPEAPGNMGL

SEQ ID NO: 3169 - protein, 11 aa, Artificial sequence
  synthetic peptide
NPEAPGNMGLF

SEQ ID NO: 3170 - protein, 11 aa, Artificial sequence
  synthetic peptide
PEAPGNMGLFD

SEQ ID NO: 3171 - protein, 11 aa, Artificial sequence
  synthetic peptide
EAPGNMGLFDQ

SEQ ID NO: 3172 - protein, 11 aa, Artificial sequence
  synthetic peptide
APGNMGLFDQQ

SEQ ID NO: 3173 - protein, 11 aa, Artificial sequence
  synthetic peptide
PGNMGLFDQQL

SEQ ID NO: 3174 - protein, 11 aa, Artificial sequence
  synthetic peptide
GNMGLFDQQLA

SEQ ID NO: 3175 - protein, 11 aa, Artificial sequence
  synthetic peptide
NMGLFDQQLAL

SEQ ID NO: 3176 - protein, 11 aa, Artificial sequence
  synthetic peptide
MGLFDQQLALQ

SEQ ID NO: 3177 - protein, 11 aa, Artificial sequence
  synthetic peptide
GLFDQQLALQW

SEQ ID NO: 3178 - protein, 11 aa, Artificial sequence
  synthetic peptide
LFDQQLALQWV

SEQ ID NO: 3179 - protein, 11 aa, Artificial sequence
  synthetic peptide
FDQQLALQWVQ

SEQ ID NO: 3180 - protein, 11 aa, Artificial sequence
  synthetic peptide
DQQLALQWVQK

SEQ ID NO: 3181 - protein, 11 aa, Artificial sequence
  synthetic peptide
QQLALQWVQKN

SEQ ID NO: 3182 - protein, 11 aa, Artificial sequence
  synthetic peptide
QLALQWVQKNI

SEQ ID NO: 3183 - protein, 11 aa, Artificial sequence
  synthetic peptide
LALQWVQKNIA

SEQ ID NO: 3184 - protein, 11 aa, Artificial sequence
  synthetic peptide
ALQWVQKNIAA

SEQ ID NO: 3185 - protein, 11 aa, Artificial sequence
  synthetic peptide
LQWVQKNIAAF

SEQ ID NO: 3186 - protein, 11 aa, Artificial sequence
  synthetic peptide
QWVQKNIAAFG

SEQ ID NO: 3187 - protein, 11 aa, Artificial sequence
  synthetic peptide
WVQKNIAAFGG

SEQ ID NO: 3188 - protein, 11 aa, Artificial sequence
  synthetic peptide
VQKNIAAFGGN

SEQ ID NO: 3189 - protein, 11 aa, Artificial sequence
  synthetic peptide
QKNIAAFGGNP

SEQ ID NO: 3190 - protein, 11 aa, Artificial sequence
  synthetic peptide
KNIAAFGGNPK

SEQ ID NO: 3191 - protein, 11 aa, Artificial sequence
  synthetic peptide
NIAAFGGNPKS

SEQ ID NO: 3192 - protein, 11 aa, Artificial sequence
  synthetic peptide
IAAFGGNPKSV

SEQ ID NO: 3193 - protein, 11 aa, Artificial sequence
  synthetic peptide
AAFGGNPKSVT

SEQ ID NO: 3194 - protein, 11 aa, Artificial sequence
  synthetic peptide
AFGGNPKSVTL

SEQ ID NO: 3195 - protein, 11 aa, Artificial sequence
  synthetic peptide
FGGNPKSVTLF

SEQ ID NO: 3196 - protein, 11 aa, Artificial sequence
  synthetic peptide
GGNPKSVTLFG

SEQ ID NO: 3197 - protein, 11 aa, Artificial sequence
  synthetic peptide
GNPKSVTLFGE

SEQ ID NO: 3198 - protein, 11 aa, Artificial sequence
  synthetic peptide
NPKSVTLFGES

SEQ ID NO: 3199 - protein, 11 aa, Artificial sequence
  synthetic peptide
PKSVTLFGESA

SEQ ID NO: 3200 - protein, 11 aa, Artificial sequence
  synthetic peptide
KSVTLFGESAG

SEQ ID NO: 3201 - protein, 11 aa, Artificial sequence
  synthetic peptide
SVTLFGESAGA

SEQ ID NO: 3202 - protein, 11 aa, Artificial sequence
  synthetic peptide
VTLFGESAGAA

SEQ ID NO: 3203 - protein, 11 aa, Artificial sequence
  synthetic peptide
TLFGESAGAAS

SEQ ID NO: 3204 - protein, 11 aa, Artificial sequence
  synthetic peptide
LFGESAGAASV

SEQ ID NO: 3205 - protein, 11 aa, Artificial sequence
  synthetic peptide
FGESAGAASVS

SEQ ID NO: 3206 - protein, 11 aa, Artificial sequence
  synthetic peptide
GESAGAASVSL

SEQ ID NO: 3207 - protein, 11 aa, Artificial sequence
  synthetic peptide
ESAGAASVSLH

SEQ ID NO: 3208 - protein, 11 aa, Artificial sequence
  synthetic peptide
SAGAASVSLHL

SEQ ID NO: 3209 - protein, 11 aa, Artificial sequence
  synthetic peptide
AGAASVSLHLL

SEQ ID NO: 3210 - protein, 11 aa, Artificial sequence
  synthetic peptide
GAASVSLHLLS

SEQ ID NO: 3211 - protein, 11 aa, Artificial sequence
  synthetic peptide
AASVSLHLLSP

SEQ ID NO: 3212 - protein, 11 aa, Artificial sequence
  synthetic peptide
ASVSLHLLSPG

SEQ ID NO: 3213 - protein, 11 aa, Artificial sequence
  synthetic peptide
SVSLHLLSPGS

SEQ ID NO: 3214 - protein, 11 aa, Artificial sequence
  synthetic peptide
VSLHLLSPGSH

SEQ ID NO: 3215 - protein, 11 aa, Artificial sequence
  synthetic peptide
SLHLLSPGSHS

SEQ ID NO: 3216 - protein, 11 aa, Artificial sequence
  synthetic peptide
LHLLSPGSHSL

SEQ ID NO: 3217 - protein, 11 aa, Artificial sequence
  synthetic peptide
HLLSPGSHSLF

SEQ ID NO: 3218 - protein, 11 aa, Artificial sequence
  synthetic peptide
LLSPGSHSLFT

SEQ ID NO: 3219 - protein, 11 aa, Artificial sequence
  synthetic peptide
LSPGSHSLFTR

SEQ ID NO: 3220 - protein, 11 aa, Artificial sequence
  synthetic peptide
SPGSHSLFTRA

SEQ ID NO: 3221 - protein, 11 aa, Artificial sequence
  synthetic peptide
PGSHSLFTRAI

SEQ ID NO: 3222 - protein, 11 aa, Artificial sequence
  synthetic peptide
GSHSLFTRAIL

SEQ ID NO: 3223 - protein, 11 aa, Artificial sequence
  synthetic peptide
SHSLFTRAILQ

SEQ ID NO: 3224 - protein, 11 aa, Artificial sequence
  synthetic peptide
HSLFTRAILQS

SEQ ID NO: 3225 - protein, 11 aa, Artificial sequence
  synthetic peptide
SLFTRAILQSG

SEQ ID NO: 3226 - protein, 11 aa, Artificial sequence
  synthetic peptide
LFTRAILQSGS

SEQ ID NO: 3227 - protein, 11 aa, Artificial sequence
  synthetic peptide
FTRAILQSGSF

SEQ ID NO: 3228 - protein, 11 aa, Artificial sequence
  synthetic peptide
TRAILQSGSFN

SEQ ID NO: 3229 - protein, 11 aa, Artificial sequence
  synthetic peptide
RAILQSGSFNA

SEQ ID NO: 3230 - protein, 11 aa, Artificial sequence
  synthetic peptide
AILQSGSFNAP

SEQ ID NO: 3231 - protein, 11 aa, Artificial sequence
  synthetic peptide
ILQSGSFNAPW

SEQ ID NO: 3232 - protein, 11 aa, Artificial sequence
  synthetic peptide
LQSGSFNAPWA

SEQ ID NO: 3233 - protein, 11 aa, Artificial sequence
  synthetic peptide
QSGSFNAPWAV

SEQ ID NO: 3234 - protein, 11 aa, Artificial sequence
  synthetic peptide
SGSFNAPWAVT

SEQ ID NO: 3235 - protein, 11 aa, Artificial sequence
  synthetic peptide
GSFNAPWAVTS

SEQ ID NO: 3236 - protein, 11 aa, Artificial sequence
  synthetic peptide
SFNAPWAVTSL

SEQ ID NO: 3237 - protein, 11 aa, Artificial sequence
  synthetic peptide
FNAPWAVTSLY

SEQ ID NO: 3238 - protein, 11 aa, Artificial sequence
  synthetic peptide
NAPWAVTSLYE

SEQ ID NO: 3239 - protein, 11 aa, Artificial sequence
  synthetic peptide
APWAVTSLYEA

SEQ ID NO: 3240 - protein, 11 aa, Artificial sequence
  synthetic peptide
PWAVTSLYEAR

SEQ ID NO: 3241 - protein, 11 aa, Artificial sequence
  synthetic peptide
WAVTSLYEARN

SEQ ID NO: 3242 - protein, 11 aa, Artificial sequence
  synthetic peptide
AVTSLYEARNR

SEQ ID NO: 3243 - protein, 11 aa, Artificial sequence
  synthetic peptide
VTSLYEARNRT

SEQ ID NO: 3244 - protein, 11 aa, Artificial sequence
  synthetic peptide
TSLYEARNRTL

SEQ ID NO: 3245 - protein, 11 aa, Artificial sequence
  synthetic peptide
SLYEARNRTLN

SEQ ID NO: 3246 - protein, 11 aa, Artificial sequence
  synthetic peptide
LYEARNRTLNL

SEQ ID NO: 3247 - protein, 11 aa, Artificial sequence
  synthetic peptide
YEARNRTLNLA

SEQ ID NO: 3248 - protein, 11 aa, Artificial sequence
  synthetic peptide
EARNRTLNLAK

SEQ ID NO: 3249 - protein, 11 aa, Artificial sequence
  synthetic peptide
ARNRTLNLAKL

SEQ ID NO: 3250 - protein, 11 aa, Artificial sequence
  synthetic peptide
RNRTLNLAKLT

SEQ ID NO: 3251 - protein, 11 aa, Artificial sequence
  synthetic peptide
NRTLNLAKLTG

SEQ ID NO: 3252 - protein, 11 aa, Artificial sequence
  synthetic peptide
RTLNLAKLTGC

SEQ ID NO: 3253 - protein, 11 aa, Artificial sequence
  synthetic peptide
TLNLAKLTGCS

SEQ ID NO: 3254 - protein, 11 aa, Artificial sequence
  synthetic peptide
LNLAKLTGCSR

SEQ ID NO: 3255 - protein, 11 aa, Artificial sequence
  synthetic peptide
NLAKLTGCSRE

SEQ ID NO: 3256 - protein, 11 aa, Artificial sequence
  synthetic peptide
LAKLTGCSREN

SEQ ID NO: 3257 - protein, 11 aa, Artificial sequence
  synthetic peptide
AKLTGCSRENE

SEQ ID NO: 3258 - protein, 11 aa, Artificial sequence
  synthetic peptide
KLTGCSRENET

SEQ ID NO: 3259 - protein, 11 aa, Artificial sequence
  synthetic peptide
LTGCSRENETE

SEQ ID NO: 3260 - protein, 11 aa, Artificial sequence
  synthetic peptide
TGCSRENETEI

SEQ ID NO: 3261 - protein, 11 aa, Artificial sequence
  synthetic peptide
GCSRENETEII

SEQ ID NO: 3262 - protein, 11 aa, Artificial sequence
  synthetic peptide
CSRENETEIIK

SEQ ID NO: 3263 - protein, 11 aa, Artificial sequence
  synthetic peptide
SRENETEIIKC

SEQ ID NO: 3264 - protein, 11 aa, Artificial sequence
  synthetic peptide
RENETEIIKCL

SEQ ID NO: 3265 - protein, 11 aa, Artificial sequence
  synthetic peptide
ENETEIIKCLR

SEQ ID NO: 3266 - protein, 11 aa, Artificial sequence
  synthetic peptide
NETEIIKCLRN

SEQ ID NO: 3267 - protein, 11 aa, Artificial sequence
  synthetic peptide
ETEIIKCLRNK

SEQ ID NO: 3268 - protein, 11 aa, Artificial sequence
  synthetic peptide
TEIIKCLRNKD

SEQ ID NO: 3269 - protein, 11 aa, Artificial sequence
  synthetic peptide
EIIKCLRNKDP

SEQ ID NO: 3270 - protein, 11 aa, Artificial sequence
  synthetic peptide
IIKCLRNKDPQ

SEQ ID NO: 3271 - protein, 11 aa, Artificial sequence
  synthetic peptide
IKCLRNKDPQE

SEQ ID NO: 3272 - protein, 11 aa, Artificial sequence
  synthetic peptide
KCLRNKDPQEI

SEQ ID NO: 3273 - protein, 11 aa, Artificial sequence
  synthetic peptide
CLRNKDPQEIL

SEQ ID NO: 3274 - protein, 11 aa, Artificial sequence
  synthetic peptide
LRNKDPQEILL

SEQ ID NO: 3275 - protein, 11 aa, Artificial sequence
  synthetic peptide
RNKDPQEILLN

SEQ ID NO: 3276 - protein, 11 aa, Artificial sequence
  synthetic peptide
NKDPQEILLNE

SEQ ID NO: 3277 - protein, 11 aa, Artificial sequence
  synthetic peptide
KDPQEILLNEA

SEQ ID NO: 3278 - protein, 11 aa, Artificial sequence
  synthetic peptide
DPQEILLNEAF

SEQ ID NO: 3279 - protein, 11 aa, Artificial sequence
  synthetic peptide
PQEILLNEAFV

SEQ ID NO: 3280 - protein, 11 aa, Artificial sequence
  synthetic peptide
QEILLNEAFVV

SEQ ID NO: 3281 - protein, 11 aa, Artificial sequence
  synthetic peptide
EILLNEAFVVP

SEQ ID NO: 3282 - protein, 11 aa, Artificial sequence
  synthetic peptide
ILLNEAFVVPY

SEQ ID NO: 3283 - protein, 11 aa, Artificial sequence
  synthetic peptide
LLNEAFVVPYG

SEQ ID NO: 3284 - protein, 11 aa, Artificial sequence
  synthetic peptide
LNEAFVVPYGT

SEQ ID NO: 3285 - protein, 11 aa, Artificial sequence
  synthetic peptide
NEAFVVPYGTP

SEQ ID NO: 3286 - protein, 11 aa, Artificial sequence
  synthetic peptide
EAFVVPYGTPL

SEQ ID NO: 3287 - protein, 11 aa, Artificial sequence
  synthetic peptide
AFVVPYGTPLS

SEQ ID NO: 3288 - protein, 11 aa, Artificial sequence
  synthetic peptide
FVVPYGTPLSV

SEQ ID NO: 3289 - protein, 11 aa, Artificial sequence
  synthetic peptide
VVPYGTPLSVN

SEQ ID NO: 3290 - protein, 11 aa, Artificial sequence
  synthetic peptide
VPYGTPLSVNF

SEQ ID NO: 3291 - protein, 11 aa, Artificial sequence
  synthetic peptide
PYGTPLSVNFG

SEQ ID NO: 3292 - protein, 11 aa, Artificial sequence
  synthetic peptide
YGTPLSVNFGP

SEQ ID NO: 3293 - protein, 11 aa, Artificial sequence
  synthetic peptide
GTPLSVNFGPT

SEQ ID NO: 3294 - protein, 11 aa, Artificial sequence
  synthetic peptide
TPLSVNFGPTV

SEQ ID NO: 3295 - protein, 11 aa, Artificial sequence
  synthetic peptide
PLSVNFGPTVD

SEQ ID NO: 3296 - protein, 11 aa, Artificial sequence
  synthetic peptide
LSVNFGPTVDG

SEQ ID NO: 3297 - protein, 11 aa, Artificial sequence
  synthetic peptide
SVNFGPTVDGD

SEQ ID NO: 3298 - protein, 11 aa, Artificial sequence
  synthetic peptide
VNFGPTVDGDF

SEQ ID NO: 3299 - protein, 11 aa, Artificial sequence
  synthetic peptide
NFGPTVDGDFL

SEQ ID NO: 3300 - protein, 11 aa, Artificial sequence
  synthetic peptide
FGPTVDGDFLT

SEQ ID NO: 3301 - protein, 11 aa, Artificial sequence
  synthetic peptide
GPTVDGDFLTD

SEQ ID NO: 3302 - protein, 11 aa, Artificial sequence
  synthetic peptide
PTVDGDFLTDM

SEQ ID NO: 3303 - protein, 11 aa, Artificial sequence
  synthetic peptide
TVDGDFLTDMP

SEQ ID NO: 3304 - protein, 11 aa, Artificial sequence
  synthetic peptide
VDGDFLTDMPD

SEQ ID NO: 3305 - protein, 11 aa, Artificial sequence
  synthetic peptide
DGDFLTDMPDI

SEQ ID NO: 3306 - protein, 11 aa, Artificial sequence
  synthetic peptide
GDFLTDMPDIL

SEQ ID NO: 3307 - protein, 11 aa, Artificial sequence
  synthetic peptide
DFLTDMPDILL

SEQ ID NO: 3308 - protein, 11 aa, Artificial sequence
  synthetic peptide
FLTDMPDILLE

SEQ ID NO: 3309 - protein, 11 aa, Artificial sequence
  synthetic peptide
LTDMPDILLEL

SEQ ID NO: 3310 - protein, 11 aa, Artificial sequence
  synthetic peptide
TDMPDILLELG

SEQ ID NO: 3311 - protein, 11 aa, Artificial sequence
  synthetic peptide
DMPDILLELGQ

SEQ ID NO: 3312 - protein, 11 aa, Artificial sequence
  synthetic peptide
MPDILLELGQF

SEQ ID NO: 3313 - protein, 11 aa, Artificial sequence
  synthetic peptide
PDILLELGQFK

SEQ ID NO: 3314 - protein, 11 aa, Artificial sequence
  synthetic peptide
DILLELGQFKK

SEQ ID NO: 3315 - protein, 11 aa, Artificial sequence
  synthetic peptide
ILLELGQFKKT

SEQ ID NO: 3316 - protein, 11 aa, Artificial sequence
  synthetic peptide
LLELGQFKKTQ

SEQ ID NO: 3317 - protein, 11 aa, Artificial sequence
  synthetic peptide
LELGQFKKTQI

SEQ ID NO: 3318 - protein, 11 aa, Artificial sequence
  synthetic peptide
ELGQFKKTQIL

SEQ ID NO: 3319 - protein, 11 aa, Artificial sequence
  synthetic peptide
LGQFKKTQILV

SEQ ID NO: 3320 - protein, 11 aa, Artificial sequence
  synthetic peptide
GQFKKTQILVG

SEQ ID NO: 3321 - protein, 11 aa, Artificial sequence
  synthetic peptide
QFKKTQILVGV

SEQ ID NO: 3322 - protein, 11 aa, Artificial sequence
  synthetic peptide
FKKTQILVGVN

SEQ ID NO: 3323 - protein, 11 aa, Artificial sequence
  synthetic peptide
KKTQILVGVNK

SEQ ID NO: 3324 - protein, 11 aa, Artificial sequence
  synthetic peptide
KTQILVGVNKD

SEQ ID NO: 3325 - protein, 11 aa, Artificial sequence
  synthetic peptide
TQILVGVNKDE

SEQ ID NO: 3326 - protein, 11 aa, Artificial sequence
  synthetic peptide
QILVGVNKDEG

SEQ ID NO: 3327 - protein, 11 aa, Artificial sequence
  synthetic peptide
ILVGVNKDEGT

SEQ ID NO: 3328 - protein, 11 aa, Artificial sequence
  synthetic peptide
LVGVNKDEGTA

SEQ ID NO: 3329 - protein, 11 aa, Artificial sequence
  synthetic peptide
VGVNKDEGTAF

SEQ ID NO: 3330 - protein, 11 aa, Artificial sequence
  synthetic peptide
GVNKDEGTAFL

SEQ ID NO: 3331 - protein, 11 aa, Artificial sequence
  synthetic peptide
VNKDEGTAFLV

SEQ ID NO: 3332 - protein, 11 aa, Artificial sequence
  synthetic peptide
NKDEGTAFLVY

SEQ ID NO: 3333 - protein, 11 aa, Artificial sequence
  synthetic peptide
KDEGTAFLVYG

SEQ ID NO: 3334 - protein, 11 aa, Artificial sequence
  synthetic peptide
DEGTAFLVYGA

SEQ ID NO: 3335 - protein, 11 aa, Artificial sequence
  synthetic peptide
EGTAFLVYGAP

SEQ ID NO: 3336 - protein, 11 aa, Artificial sequence
  synthetic peptide
GTAFLVYGAPG

SEQ ID NO: 3337 - protein, 11 aa, Artificial sequence
  synthetic peptide
TAFLVYGAPGF

SEQ ID NO: 3338 - protein, 11 aa, Artificial sequence
  synthetic peptide
AFLVYGAPGFS

SEQ ID NO: 3339 - protein, 11 aa, Artificial sequence
  synthetic peptide
FLVYGAPGFSK

SEQ ID NO: 3340 - protein, 11 aa, Artificial sequence
  synthetic peptide
LVYGAPGFSKD

SEQ ID NO: 3341 - protein, 11 aa, Artificial sequence
  synthetic peptide
VYGAPGFSKDN

SEQ ID NO: 3342 - protein, 11 aa, Artificial sequence
  synthetic peptide
YGAPGFSKDNN

SEQ ID NO: 3343 - protein, 11 aa, Artificial sequence
  synthetic peptide
GAPGFSKDNNS

SEQ ID NO: 3344 - protein, 11 aa, Artificial sequence
  synthetic peptide
APGFSKDNNSI

SEQ ID NO: 3345 - protein, 11 aa, Artificial sequence
  synthetic peptide
PGFSKDNNSII

SEQ ID NO: 3346 - protein, 11 aa, Artificial sequence
  synthetic peptide
GFSKDNNSIIT

SEQ ID NO: 3347 - protein, 11 aa, Artificial sequence
  synthetic peptide
FSKDNNSIITR

SEQ ID NO: 3348 - protein, 11 aa, Artificial sequence
  synthetic peptide
SKDNNSIITRK

SEQ ID NO: 3349 - protein, 11 aa, Artificial sequence
  synthetic peptide
KDNNSIITRKE

SEQ ID NO: 3350 - protein, 11 aa, Artificial sequence
  synthetic peptide
DNNSIITRKEF

SEQ ID NO: 3351 - protein, 11 aa, Artificial sequence
  synthetic peptide
NNSIITRKEFQ

SEQ ID NO: 3352 - protein, 11 aa, Artificial sequence
  synthetic peptide
NSIITRKEFQE

SEQ ID NO: 3353 - protein, 11 aa, Artificial sequence
  synthetic peptide
SIITRKEFQEG

SEQ ID NO: 3354 - protein, 11 aa, Artificial sequence
  synthetic peptide
IITRKEFQEGL

SEQ ID NO: 3355 - protein, 11 aa, Artificial sequence
  synthetic peptide
ITRKEFQEGLK

SEQ ID NO: 3356 - protein, 11 aa, Artificial sequence
  synthetic peptide
TRKEFQEGLKI

SEQ ID NO: 3357 - protein, 11 aa, Artificial sequence
  synthetic peptide
RKEFQEGLKIF

SEQ ID NO: 3358 - protein, 11 aa, Artificial sequence
  synthetic peptide
KEFQEGLKIFF

SEQ ID NO: 3359 - protein, 11 aa, Artificial sequence
  synthetic peptide
EFQEGLKIFFP

SEQ ID NO: 3360 - protein, 11 aa, Artificial sequence
  synthetic peptide
FQEGLKIFFPG

SEQ ID NO: 3361 - protein, 11 aa, Artificial sequence
  synthetic peptide
QEGLKIFFPGV

SEQ ID NO: 3362 - protein, 11 aa, Artificial sequence
  synthetic peptide
EGLKIFFPGVS

SEQ ID NO: 3363 - protein, 11 aa, Artificial sequence
  synthetic peptide
GLKIFFPGVSE

SEQ ID NO: 3364 - protein, 11 aa, Artificial sequence
  synthetic peptide
LKIFFPGVSEF

SEQ ID NO: 3365 - protein, 11 aa, Artificial sequence
  synthetic peptide
KIFFPGVSEFG

SEQ ID NO: 3366 - protein, 11 aa, Artificial sequence
  synthetic peptide
IFFPGVSEFGK

SEQ ID NO: 3367 - protein, 11 aa, Artificial sequence
  synthetic peptide
FFPGVSEFGKE

SEQ ID NO: 3368 - protein, 11 aa, Artificial sequence
  synthetic peptide
FPGVSEFGKES

SEQ ID NO: 3369 - protein, 11 aa, Artificial sequence
  synthetic peptide
PGVSEFGKESI

SEQ ID NO: 3370 - protein, 11 aa, Artificial sequence
  synthetic peptide
GVSEFGKESIL

SEQ ID NO: 3371 - protein, 11 aa, Artificial sequence
  synthetic peptide
VSEFGKESILF

SEQ ID NO: 3372 - protein, 11 aa, Artificial sequence
  synthetic peptide
SEFGKESILFH

SEQ ID NO: 3373 - protein, 11 aa, Artificial sequence
  synthetic peptide
EFGKESILFHY

SEQ ID NO: 3374 - protein, 11 aa, Artificial sequence
  synthetic peptide
FGKESILFHYT

SEQ ID NO: 3375 - protein, 11 aa, Artificial sequence
  synthetic peptide
GKESILFHYTD

SEQ ID NO: 3376 - protein, 11 aa, Artificial sequence
  synthetic peptide
KESILFHYTDW

SEQ ID NO: 3377 - protein, 11 aa, Artificial sequence
  synthetic peptide
ESILFHYTDWV

SEQ ID NO: 3378 - protein, 11 aa, Artificial sequence
  synthetic peptide
SILFHYTDWVD

SEQ ID NO: 3379 - protein, 11 aa, Artificial sequence
  synthetic peptide
ILFHYTDWVDD

SEQ ID NO: 3380 - protein, 11 aa, Artificial sequence
  synthetic peptide
LFHYTDWVDDQ

SEQ ID NO: 3381 - protein, 11 aa, Artificial sequence
  synthetic peptide
FHYTDWVDDQR

SEQ ID NO: 3382 - protein, 11 aa, Artificial sequence
  synthetic peptide
HYTDWVDDQRP

SEQ ID NO: 3383 - protein, 11 aa, Artificial sequence
  synthetic peptide
YTDWVDDQRPE

SEQ ID NO: 3384 - protein, 11 aa, Artificial sequence
  synthetic peptide
TDWVDDQRPEN

SEQ ID NO: 3385 - protein, 11 aa, Artificial sequence
  synthetic peptide
DWVDDQRPENY

SEQ ID NO: 3386 - protein, 11 aa, Artificial sequence
  synthetic peptide
WVDDQRPENYR

SEQ ID NO: 3387 - protein, 11 aa, Artificial sequence
  synthetic peptide
VDDQRPENYRE

SEQ ID NO: 3388 - protein, 11 aa, Artificial sequence
  synthetic peptide
DDQRPENYREA

SEQ ID NO: 3389 - protein, 11 aa, Artificial sequence
  synthetic peptide
DQRPENYREAL

SEQ ID NO: 3390 - protein, 11 aa, Artificial sequence
  synthetic peptide
QRPENYREALG

SEQ ID NO: 3391 - protein, 11 aa, Artificial sequence
  synthetic peptide
RPENYREALGD

SEQ ID NO: 3392 - protein, 11 aa, Artificial sequence
  synthetic peptide
PENYREALGDV

SEQ ID NO: 3393 - protein, 11 aa, Artificial sequence
  synthetic peptide
ENYREALGDVV

SEQ ID NO: 3394 - protein, 11 aa, Artificial sequence
  synthetic peptide
NYREALGDVVG

SEQ ID NO: 3395 - protein, 11 aa, Artificial sequence
  synthetic peptide
YREALGDVVGD

SEQ ID NO: 3396 - protein, 11 aa, Artificial sequence
  synthetic peptide
REALGDVVGDY

SEQ ID NO: 3397 - protein, 11 aa, Artificial sequence
  synthetic peptide
EALGDVVGDYN

SEQ ID NO: 3398 - protein, 11 aa, Artificial sequence
  synthetic peptide
ALGDVVGDYNF

SEQ ID NO: 3399 - protein, 11 aa, Artificial sequence
  synthetic peptide
LGDVVGDYNFI

SEQ ID NO: 3400 - protein, 11 aa, Artificial sequence
  synthetic peptide
GDVVGDYNFIC

SEQ ID NO: 3401 - protein, 11 aa, Artificial sequence
  synthetic peptide
DVVGDYNFICP

SEQ ID NO: 3402 - protein, 11 aa, Artificial sequence
  synthetic peptide
VVGDYNFICPA

SEQ ID NO: 3403 - protein, 11 aa, Artificial sequence
  synthetic peptide
VGDYNFICPAL

SEQ ID NO: 3404 - protein, 11 aa, Artificial sequence
  synthetic peptide
GDYNFICPALE

SEQ ID NO: 3405 - protein, 11 aa, Artificial sequence
  synthetic peptide
DYNFICPALEF

SEQ ID NO: 3406 - protein, 11 aa, Artificial sequence
  synthetic peptide
YNFICPALEFT

SEQ ID NO: 3407 - protein, 11 aa, Artificial sequence
  synthetic peptide
NFICPALEFTK

SEQ ID NO: 3408 - protein, 11 aa, Artificial sequence
  synthetic peptide
FICPALEFTKK

SEQ ID NO: 3409 - protein, 11 aa, Artificial sequence
  synthetic peptide
ICPALEFTKKF

SEQ ID NO: 3410 - protein, 11 aa, Artificial sequence
  synthetic peptide
CPALEFTKKFS

SEQ ID NO: 3411 - protein, 11 aa, Artificial sequence
  synthetic peptide
PALEFTKKFSE

SEQ ID NO: 3412 - protein, 11 aa, Artificial sequence
  synthetic peptide
ALEFTKKFSEW

SEQ ID NO: 3413 - protein, 11 aa, Artificial sequence
  synthetic peptide
LEFTKKFSEWG

SEQ ID NO: 3414 - protein, 11 aa, Artificial sequence
  synthetic peptide
EFTKKFSEWGN

SEQ ID NO: 3415 - protein, 11 aa, Artificial sequence
  synthetic peptide
FTKKFSEWGNN

SEQ ID NO: 3416 - protein, 11 aa, Artificial sequence
  synthetic peptide
TKKFSEWGNNA

SEQ ID NO: 3417 - protein, 11 aa, Artificial sequence
  synthetic peptide
KKFSEWGNNAF

SEQ ID NO: 3418 - protein, 11 aa, Artificial sequence
  synthetic peptide
KFSEWGNNAFF

SEQ ID NO: 3419 - protein, 11 aa, Artificial sequence
  synthetic peptide
FSEWGNNAFFY

SEQ ID NO: 3420 - protein, 11 aa, Artificial sequence
  synthetic peptide
SEWGNNAFFYY

SEQ ID NO: 3421 - protein, 11 aa, Artificial sequence
  synthetic peptide
EWGNNAFFYYF

SEQ ID NO: 3422 - protein, 11 aa, Artificial sequence
  synthetic peptide
WGNNAFFYYFE

SEQ ID NO: 3423 - protein, 11 aa, Artificial sequence
  synthetic peptide
GNNAFFYYFEH

SEQ ID NO: 3424 - protein, 11 aa, Artificial sequence
  synthetic peptide
NNAFFYYFEHR

SEQ ID NO: 3425 - protein, 11 aa, Artificial sequence
  synthetic peptide
NAFFYYFEHRS

SEQ ID NO: 3426 - protein, 11 aa, Artificial sequence
  synthetic peptide
AFFYYFEHRSS

SEQ ID NO: 3427 - protein, 11 aa, Artificial sequence
  synthetic peptide
FFYYFEHRSSK

SEQ ID NO: 3428 - protein, 11 aa, Artificial sequence
  synthetic peptide
FYYFEHRSSKL

SEQ ID NO: 3429 - protein, 11 aa, Artificial sequence
  synthetic peptide
YYFEHRSSKLP

SEQ ID NO: 3430 - protein, 11 aa, Artificial sequence
  synthetic peptide
YFEHRSSKLPW

SEQ ID NO: 3431 - protein, 11 aa, Artificial sequence
  synthetic peptide
FEHRSSKLPWP

SEQ ID NO: 3432 - protein, 11 aa, Artificial sequence
  synthetic peptide
EHRSSKLPWPE

SEQ ID NO: 3433 - protein, 11 aa, Artificial sequence
  synthetic peptide
HRSSKLPWPEW

SEQ ID NO: 3434 - protein, 11 aa, Artificial sequence
  synthetic peptide
RSSKLPWPEWM

SEQ ID NO: 3435 - protein, 11 aa, Artificial sequence
  synthetic peptide
SSKLPWPEWMG

SEQ ID NO: 3436 - protein, 11 aa, Artificial sequence
  synthetic peptide
SKLPWPEWMGV

SEQ ID NO: 3437 - protein, 11 aa, Artificial sequence
  synthetic peptide
KLPWPEWMGVM

SEQ ID NO: 3438 - protein, 11 aa, Artificial sequence
  synthetic peptide
LPWPEWMGVMH

SEQ ID NO: 3439 - protein, 11 aa, Artificial sequence
  synthetic peptide
PWPEWMGVMHG

SEQ ID NO: 3440 - protein, 11 aa, Artificial sequence
  synthetic peptide
WPEWMGVMHGY

SEQ ID NO: 3441 - protein, 11 aa, Artificial sequence
  synthetic peptide
PEWMGVMHGYE

SEQ ID NO: 3442 - protein, 11 aa, Artificial sequence
  synthetic peptide
EWMGVMHGYEI

SEQ ID NO: 3443 - protein, 11 aa, Artificial sequence
  synthetic peptide
WMGVMHGYEIE

SEQ ID NO: 3444 - protein, 11 aa, Artificial sequence
  synthetic peptide
MGVMHGYEIEF

SEQ ID NO: 3445 - protein, 11 aa, Artificial sequence
  synthetic peptide
GVMHGYEIEFV

SEQ ID NO: 3446 - protein, 11 aa, Artificial sequence
  synthetic peptide
VMHGYEIEFVF

SEQ ID NO: 3447 - protein, 11 aa, Artificial sequence
  synthetic peptide
MHGYEIEFVFG

SEQ ID NO: 3448 - protein, 11 aa, Artificial sequence
  synthetic peptide
HGYEIEFVFGL

SEQ ID NO: 3449 - protein, 11 aa, Artificial sequence
  synthetic peptide
GYEIEFVFGLP

SEQ ID NO: 3450 - protein, 11 aa, Artificial sequence
  synthetic peptide
YEIEFVFGLPL

SEQ ID NO: 3451 - protein, 11 aa, Artificial sequence
  synthetic peptide
EIEFVFGLPLE

SEQ ID NO: 3452 - protein, 11 aa, Artificial sequence
  synthetic peptide
IEFVFGLPLER

SEQ ID NO: 3453 - protein, 11 aa, Artificial sequence
  synthetic peptide
EFVFGLPLERR

SEQ ID NO: 3454 - protein, 11 aa, Artificial sequence
  synthetic peptide
FVFGLPLERRD

SEQ ID NO: 3455 - protein, 11 aa, Artificial sequence
  synthetic peptide
VFGLPLERRDN

SEQ ID NO: 3456 - protein, 11 aa, Artificial sequence
  synthetic peptide
FGLPLERRDNY

SEQ ID NO: 3457 - protein, 11 aa, Artificial sequence
  synthetic peptide
GLPLERRDNYT

SEQ ID NO: 3458 - protein, 11 aa, Artificial sequence
  synthetic peptide
LPLERRDNYTK

SEQ ID NO: 3459 - protein, 11 aa, Artificial sequence
  synthetic peptide
PLERRDNYTKA

SEQ ID NO: 3460 - protein, 11 aa, Artificial sequence
  synthetic peptide
LERRDNYTKAE

SEQ ID NO: 3461 - protein, 11 aa, Artificial sequence
  synthetic peptide
ERRDNYTKAEE

SEQ ID NO: 3462 - protein, 11 aa, Artificial sequence
  synthetic peptide
RRDNYTKAEEI

SEQ ID NO: 3463 - protein, 11 aa, Artificial sequence
  synthetic peptide
RDNYTKAEEIL

SEQ ID NO: 3464 - protein, 11 aa, Artificial sequence
  synthetic peptide
DNYTKAEEILS

SEQ ID NO: 3465 - protein, 11 aa, Artificial sequence
  synthetic peptide
NYTKAEEILSR

SEQ ID NO: 3466 - protein, 11 aa, Artificial sequence
  synthetic peptide
YTKAEEILSRS

SEQ ID NO: 3467 - protein, 11 aa, Artificial sequence
  synthetic peptide
TKAEEILSRSI

SEQ ID NO: 3468 - protein, 11 aa, Artificial sequence
  synthetic peptide
KAEEILSRSIV

SEQ ID NO: 3469 - protein, 11 aa, Artificial sequence
  synthetic peptide
AEEILSRSIVK

SEQ ID NO: 3470 - protein, 11 aa, Artificial sequence
  synthetic peptide
EEILSRSIVKR

SEQ ID NO: 3471 - protein, 11 aa, Artificial sequence
  synthetic peptide
EILSRSIVKRW

SEQ ID NO: 3472 - protein, 11 aa, Artificial sequence
  synthetic peptide
ILSRSIVKRWA

SEQ ID NO: 3473 - protein, 11 aa, Artificial sequence
  synthetic peptide
LSRSIVKRWAN

SEQ ID NO: 3474 - protein, 11 aa, Artificial sequence
  synthetic peptide
SRSIVKRWANF

SEQ ID NO: 3475 - protein, 11 aa, Artificial sequence
  synthetic peptide
RSIVKRWANFA

SEQ ID NO: 3476 - protein, 11 aa, Artificial sequence
  synthetic peptide
SIVKRWANFAK

SEQ ID NO: 3477 - protein, 11 aa, Artificial sequence
  synthetic peptide
IVKRWANFAKY

SEQ ID NO: 3478 - protein, 11 aa, Artificial sequence
  synthetic peptide
VKRWANFAKYG

SEQ ID NO: 3479 - protein, 11 aa, Artificial sequence
  synthetic peptide
KRWANFAKYGN

SEQ ID NO: 3480 - protein, 11 aa, Artificial sequence
  synthetic peptide
RWANFAKYGNP

SEQ ID NO: 3481 - protein, 11 aa, Artificial sequence
  synthetic peptide
WANFAKYGNPN

SEQ ID NO: 3482 - protein, 11 aa, Artificial sequence
  synthetic peptide
ANFAKYGNPNE

SEQ ID NO: 3483 - protein, 11 aa, Artificial sequence
  synthetic peptide
NFAKYGNPNET

SEQ ID NO: 3484 - protein, 11 aa, Artificial sequence
  synthetic peptide
FAKYGNPNETQ

SEQ ID NO: 3485 - protein, 11 aa, Artificial sequence
  synthetic peptide
AKYGNPNETQN

SEQ ID NO: 3486 - protein, 11 aa, Artificial sequence
  synthetic peptide
KYGNPNETQNN

SEQ ID NO: 3487 - protein, 11 aa, Artificial sequence
  synthetic peptide
YGNPNETQNNS

SEQ ID NO: 3488 - protein, 11 aa, Artificial sequence
  synthetic peptide
GNPNETQNNST

SEQ ID NO: 3489 - protein, 11 aa, Artificial sequence
  synthetic peptide
NPNETQNNSTS

SEQ ID NO: 3490 - protein, 11 aa, Artificial sequence
  synthetic peptide
PNETQNNSTSW

SEQ ID NO: 3491 - protein, 11 aa, Artificial sequence
  synthetic peptide
NETQNNSTSWP

SEQ ID NO: 3492 - protein, 11 aa, Artificial sequence
  synthetic peptide
ETQNNSTSWPV

SEQ ID NO: 3493 - protein, 11 aa, Artificial sequence
  synthetic peptide
TQNNSTSWPVF

SEQ ID NO: 3494 - protein, 11 aa, Artificial sequence
  synthetic peptide
QNNSTSWPVFK

SEQ ID NO: 3495 - protein, 11 aa, Artificial sequence
  synthetic peptide
NNSTSWPVFKS

SEQ ID NO: 3496 - protein, 11 aa, Artificial sequence
  synthetic peptide
NSTSWPVFKST

SEQ ID NO: 3497 - protein, 11 aa, Artificial sequence
  synthetic peptide
STSWPVFKSTE

SEQ ID NO: 3498 - protein, 11 aa, Artificial sequence
  synthetic peptide
TSWPVFKSTEQ

SEQ ID NO: 3499 - protein, 11 aa, Artificial sequence
  synthetic peptide
SWPVFKSTEQK

SEQ ID NO: 3500 - protein, 11 aa, Artificial sequence
  synthetic peptide
WPVFKSTEQKY

SEQ ID NO: 3501 - protein, 11 aa, Artificial sequence
  synthetic peptide
PVFKSTEQKYL

SEQ ID NO: 3502 - protein, 11 aa, Artificial sequence
  synthetic peptide
VFKSTEQKYLT

SEQ ID NO: 3503 - protein, 11 aa, Artificial sequence
  synthetic peptide
FKSTEQKYLTL

SEQ ID NO: 3504 - protein, 11 aa, Artificial sequence
  synthetic peptide
KSTEQKYLTLN

SEQ ID NO: 3505 - protein, 11 aa, Artificial sequence
  synthetic peptide
STEQKYLTLNT

SEQ ID NO: 3506 - protein, 11 aa, Artificial sequence
  synthetic peptide
TEQKYLTLNTE

SEQ ID NO: 3507 - protein, 11 aa, Artificial sequence
  synthetic peptide
EQKYLTLNTES

SEQ ID NO: 3508 - protein, 11 aa, Artificial sequence
  synthetic peptide
QKYLTLNTEST

SEQ ID NO: 3509 - protein, 11 aa, Artificial sequence
  synthetic peptide
KYLTLNTESTR

SEQ ID NO: 3510 - protein, 11 aa, Artificial sequence
  synthetic peptide
YLTLNTESTRI

SEQ ID NO: 3511 - protein, 11 aa, Artificial sequence
  synthetic peptide
LTLNTESTRIM

SEQ ID NO: 3512 - protein, 11 aa, Artificial sequence
  synthetic peptide
TLNTESTRIMT

SEQ ID NO: 3513 - protein, 11 aa, Artificial sequence
  synthetic peptide
LNTESTRIMTK

SEQ ID NO: 3514 - protein, 11 aa, Artificial sequence
  synthetic peptide
NTESTRIMTKL

SEQ ID NO: 3515 - protein, 11 aa, Artificial sequence
  synthetic peptide
TESTRIMTKLR

SEQ ID NO: 3516 - protein, 11 aa, Artificial sequence
  synthetic peptide
ESTRIMTKLRA

SEQ ID NO: 3517 - protein, 11 aa, Artificial sequence
  synthetic peptide
STRIMTKLRAQ

SEQ ID NO: 3518 - protein, 11 aa, Artificial sequence
  synthetic peptide
TRIMTKLRAQQ

SEQ ID NO: 3519 - protein, 11 aa, Artificial sequence
  synthetic peptide
RIMTKLRAQQC

SEQ ID NO: 3520 - protein, 11 aa, Artificial sequence
  synthetic peptide
IMTKLRAQQCR

SEQ ID NO: 3521 - protein, 11 aa, Artificial sequence
  synthetic peptide
MTKLRAQQCRF

SEQ ID NO: 3522 - protein, 11 aa, Artificial sequence
  synthetic peptide
TKLRAQQCRFW

SEQ ID NO: 3523 - protein, 11 aa, Artificial sequence
  synthetic peptide
KLRAQQCRFWT

SEQ ID NO: 3524 - protein, 11 aa, Artificial sequence
  synthetic peptide
LRAQQCRFWTS

SEQ ID NO: 3525 - protein, 11 aa, Artificial sequence
  synthetic peptide
RAQQCRFWTSF

SEQ ID NO: 3526 - protein, 11 aa, Artificial sequence
  synthetic peptide
AQQCRFWTSFF

SEQ ID NO: 3527 - protein, 11 aa, Artificial sequence
  synthetic peptide
QQCRFWTSFFP

SEQ ID NO: 3528 - protein, 11 aa, Artificial sequence
  synthetic peptide
QCRFWTSFFPK

SEQ ID NO: 3529 - protein, 11 aa, Artificial sequence
  synthetic peptide
CRFWTSFFPKV

SEQ ID NO: 3530 - protein, 11 aa, Artificial sequence
  synthetic peptide
RFWTSFFPKVL

SEQ ID NO: 3531 - protein, 11 aa, Artificial sequence
  synthetic peptide
FWTSFFPKVLE

SEQ ID NO: 3532 - protein, 11 aa, Artificial sequence
  synthetic peptide
WTSFFPKVLEM

SEQ ID NO: 3533 - protein, 11 aa, Artificial sequence
  synthetic peptide
TSFFPKVLEMT

SEQ ID NO: 3534 - protein, 11 aa, Artificial sequence
  synthetic peptide
SFFPKVLEMTG

SEQ ID NO: 3535 - protein, 11 aa, Artificial sequence
  synthetic peptide
FFPKVLEMTGN

SEQ ID NO: 3536 - protein, 11 aa, Artificial sequence
  synthetic peptide
FPKVLEMTGNI

SEQ ID NO: 3537 - protein, 11 aa, Artificial sequence
  synthetic peptide
PKVLEMTGNID

SEQ ID NO: 3538 - protein, 11 aa, Artificial sequence
  synthetic peptide
KVLEMTGNIDE

SEQ ID NO: 3539 - protein, 11 aa, Artificial sequence
  synthetic peptide
VLEMTGNIDEA

SEQ ID NO: 3540 - protein, 11 aa, Artificial sequence
  synthetic peptide
LEMTGNIDEAE

SEQ ID NO: 3541 - protein, 11 aa, Artificial sequence
  synthetic peptide
EMTGNIDEAEW

SEQ ID NO: 3542 - protein, 11 aa, Artificial sequence
  synthetic peptide
MTGNIDEAEWE

SEQ ID NO: 3543 - protein, 11 aa, Artificial sequence
  synthetic peptide
TGNIDEAEWEW

SEQ ID NO: 3544 - protein, 11 aa, Artificial sequence
  synthetic peptide
GNIDEAEWEWK

SEQ ID NO: 3545 - protein, 11 aa, Artificial sequence
  synthetic peptide
NIDEAEWEWKA

SEQ ID NO: 3546 - protein, 11 aa, Artificial sequence
  synthetic peptide
IDEAEWEWKAG

SEQ ID NO: 3547 - protein, 11 aa, Artificial sequence
  synthetic peptide
DEAEWEWKAGF

SEQ ID NO: 3548 - protein, 11 aa, Artificial sequence
  synthetic peptide
EAEWEWKAGFH

SEQ ID NO: 3549 - protein, 11 aa, Artificial sequence
  synthetic peptide
AEWEWKAGFHR

SEQ ID NO: 3550 - protein, 11 aa, Artificial sequence
  synthetic peptide
EWEWKAGFHRW

SEQ ID NO: 3551 - protein, 11 aa, Artificial sequence
  synthetic peptide
WEWKAGFHRWN

SEQ ID NO: 3552 - protein, 11 aa, Artificial sequence
  synthetic peptide
EWKAGFHRWNN

SEQ ID NO: 3553 - protein, 11 aa, Artificial sequence
  synthetic peptide
WKAGFHRWNNY

SEQ ID NO: 3554 - protein, 11 aa, Artificial sequence
  synthetic peptide
KAGFHRWNNYM

SEQ ID NO: 3555 - protein, 11 aa, Artificial sequence
  synthetic peptide
AGFHRWNNYMM

SEQ ID NO: 3556 - protein, 11 aa, Artificial sequence
  synthetic peptide
GFHRWNNYMMD

SEQ ID NO: 3557 - protein, 11 aa, Artificial sequence
  synthetic peptide
FHRWNNYMMDW

SEQ ID NO: 3558 - protein, 11 aa, Artificial sequence
  synthetic peptide
HRWNNYMMDWK

SEQ ID NO: 3559 - protein, 11 aa, Artificial sequence
  synthetic peptide
RWNNYMMDWKN

SEQ ID NO: 3560 - protein, 11 aa, Artificial sequence
  synthetic peptide
WNNYMMDWKNQ

SEQ ID NO: 3561 - protein, 11 aa, Artificial sequence
  synthetic peptide
NNYMMDWKNQF

SEQ ID NO: 3562 - protein, 11 aa, Artificial sequence
  synthetic peptide
NYMMDWKNQFN

SEQ ID NO: 3563 - protein, 11 aa, Artificial sequence
  synthetic peptide
YMMDWKNQFND

SEQ ID NO: 3564 - protein, 11 aa, Artificial sequence
  synthetic peptide
MMDWKNQFNDY

SEQ ID NO: 3565 - protein, 11 aa, Artificial sequence
  synthetic peptide
MDWKNQFNDYT

SEQ ID NO: 3566 - protein, 11 aa, Artificial sequence
  synthetic peptide
DWKNQFNDYTS

SEQ ID NO: 3567 - protein, 11 aa, Artificial sequence
  synthetic peptide
WKNQFNDYTSK

SEQ ID NO: 3568 - protein, 11 aa, Artificial sequence
  synthetic peptide
KNQFNDYTSKK

SEQ ID NO: 3569 - protein, 11 aa, Artificial sequence
  synthetic peptide
NQFNDYTSKKE

SEQ ID NO: 3570 - protein, 11 aa, Artificial sequence
  synthetic peptide
QFNDYTSKKES

SEQ ID NO: 3571 - protein, 11 aa, Artificial sequence
  synthetic peptide
FNDYTSKKESC

SEQ ID NO: 3572 - protein, 11 aa, Artificial sequence
  synthetic peptide
NDYTSKKESCV

SEQ ID NO: 3573 - protein, 11 aa, Artificial sequence
  synthetic peptide
DYTSKKESCVG

SEQ ID NO: 3574 - protein, 11 aa, Artificial sequence
  synthetic peptide
YTSKKESCVGL

SEQ ID NO: 3575 - protein, 12 aa, Artificial sequence
  synthetic peptide
MHSKVTIICIRF

SEQ ID NO: 3576 - protein, 12 aa, Artificial sequence
  synthetic peptide
HSKVTIICIRFL

SEQ ID NO: 3577 - protein, 12 aa, Artificial sequence
  synthetic peptide
SKVTIICIRFLF

SEQ ID NO: 3578 - protein, 12 aa, Artificial sequence
  synthetic peptide
KVTIICIRFLFW

SEQ ID NO: 3579 - protein, 12 aa, Artificial sequence
  synthetic peptide
VTIICIRFLFWF

SEQ ID NO: 3580 - protein, 12 aa, Artificial sequence
  synthetic peptide
TIICIRFLFWFL

SEQ ID NO: 3581 - protein, 12 aa, Artificial sequence
  synthetic peptide
IICIRFLFWFLL

SEQ ID NO: 3582 - protein, 12 aa, Artificial sequence
  synthetic peptide
ICIRFLFWFLLL

SEQ ID NO: 3583 - protein, 12 aa, Artificial sequence
  synthetic peptide
CIRFLFWFLLLC

SEQ ID NO: 3584 - protein, 12 aa, Artificial sequence
  synthetic peptide
IRFLFWFLLLCM

SEQ ID NO: 3585 - protein, 12 aa, Artificial sequence
  synthetic peptide
RFLFWFLLLCML

SEQ ID NO: 3586 - protein, 12 aa, Artificial sequence
  synthetic peptide
FLFWFLLLCMLI

SEQ ID NO: 3587 - protein, 12 aa, Artificial sequence
  synthetic peptide
LFWFLLLCMLIG

SEQ ID NO: 3588 - protein, 12 aa, Artificial sequence
  synthetic peptide
FWFLLLCMLIGK

SEQ ID NO: 3589 - protein, 12 aa, Artificial sequence
  synthetic peptide
WFLLLCMLIGKS

SEQ ID NO: 3590 - protein, 12 aa, Artificial sequence
  synthetic peptide
FLLLCMLIGKSH

SEQ ID NO: 3591 - protein, 12 aa, Artificial sequence
  synthetic peptide
LLLCMLIGKSHT

SEQ ID NO: 3592 - protein, 12 aa, Artificial sequence
  synthetic peptide
LLCMLIGKSHTE

SEQ ID NO: 3593 - protein, 12 aa, Artificial sequence
  synthetic peptide
LCMLIGKSHTED

SEQ ID NO: 3594 - protein, 12 aa, Artificial sequence
  synthetic peptide
CMLIGKSHTEDD

SEQ ID NO: 3595 - protein, 12 aa, Artificial sequence
  synthetic peptide
MLIGKSHTEDDI

SEQ ID NO: 3596 - protein, 12 aa, Artificial sequence
  synthetic peptide
LIGKSHTEDDII

SEQ ID NO: 3597 - protein, 12 aa, Artificial sequence
  synthetic peptide
IGKSHTEDDIII

SEQ ID NO: 3598 - protein, 12 aa, Artificial sequence
  synthetic peptide
GKSHTEDDIIIA

SEQ ID NO: 3599 - protein, 12 aa, Artificial sequence
  synthetic peptide
KSHTEDDIIIAT

SEQ ID NO: 3600 - protein, 12 aa, Artificial sequence
  synthetic peptide
SHTEDDIIIATK

SEQ ID NO: 3601 - protein, 12 aa, Artificial sequence
  synthetic peptide
HTEDDIIIATKN

SEQ ID NO: 3602 - protein, 12 aa, Artificial sequence
  synthetic peptide
TEDDIIIATKNG

SEQ ID NO: 3603 - protein, 12 aa, Artificial sequence
  synthetic peptide
EDDIIIATKNGK

SEQ ID NO: 3604 - protein, 12 aa, Artificial sequence
  synthetic peptide
DDIIIATKNGKV

SEQ ID NO: 3605 - protein, 12 aa, Artificial sequence
  synthetic peptide
DIIIATKNGKVR

SEQ ID NO: 3606 - protein, 12 aa, Artificial sequence
  synthetic peptide
IIIATKNGKVRG

SEQ ID NO: 3607 - protein, 12 aa, Artificial sequence
  synthetic peptide
IIATKNGKVRGM

SEQ ID NO: 3608 - protein, 12 aa, Artificial sequence
  synthetic peptide
IATKNGKVRGMN

SEQ ID NO: 3609 - protein, 12 aa, Artificial sequence
  synthetic peptide
ATKNGKVRGMNL

SEQ ID NO: 3610 - protein, 12 aa, Artificial sequence
  synthetic peptide
TKNGKVRGMNLT

SEQ ID NO: 3611 - protein, 12 aa, Artificial sequence
  synthetic peptide
KNGKVRGMNLTV

SEQ ID NO: 3612 - protein, 12 aa, Artificial sequence
  synthetic peptide
NGKVRGMNLTVF

SEQ ID NO: 3613 - protein, 12 aa, Artificial sequence
  synthetic peptide
GKVRGMNLTVFG

SEQ ID NO: 3614 - protein, 12 aa, Artificial sequence
  synthetic peptide
KVRGMNLTVFGG

SEQ ID NO: 3615 - protein, 12 aa, Artificial sequence
  synthetic peptide
VRGMNLTVFGGT

SEQ ID NO: 3616 - protein, 12 aa, Artificial sequence
  synthetic peptide
RGMNLTVFGGTV

SEQ ID NO: 3617 - protein, 12 aa, Artificial sequence
  synthetic peptide
GMNLTVFGGTVT

SEQ ID NO: 3618 - protein, 12 aa, Artificial sequence
  synthetic peptide
MNLTVFGGTVTA

SEQ ID NO: 3619 - protein, 12 aa, Artificial sequence
  synthetic peptide
NLTVFGGTVTAF

SEQ ID NO: 3620 - protein, 12 aa, Artificial sequence
  synthetic peptide
LTVFGGTVTAFL

SEQ ID NO: 3621 - protein, 12 aa, Artificial sequence
  synthetic peptide
TVFGGTVTAFLG

SEQ ID NO: 3622 - protein, 12 aa, Artificial sequence
  synthetic peptide
VFGGTVTAFLGI

SEQ ID NO: 3623 - protein, 12 aa, Artificial sequence
  synthetic peptide
FGGTVTAFLGIP

SEQ ID NO: 3624 - protein, 12 aa, Artificial sequence
  synthetic peptide
GGTVTAFLGIPY

SEQ ID NO: 3625 - protein, 12 aa, Artificial sequence
  synthetic peptide
GTVTAFLGIPYA

SEQ ID NO: 3626 - protein, 12 aa, Artificial sequence
  synthetic peptide
TVTAFLGIPYAQ

SEQ ID NO: 3627 - protein, 12 aa, Artificial sequence
  synthetic peptide
VTAFLGIPYAQP

SEQ ID NO: 3628 - protein, 12 aa, Artificial sequence
  synthetic peptide
TAFLGIPYAQPP

SEQ ID NO: 3629 - protein, 12 aa, Artificial sequence
  synthetic peptide
AFLGIPYAQPPL

SEQ ID NO: 3630 - protein, 12 aa, Artificial sequence
  synthetic peptide
FLGIPYAQPPLG

SEQ ID NO: 3631 - protein, 12 aa, Artificial sequence
  synthetic peptide
LGIPYAQPPLGR

SEQ ID NO: 3632 - protein, 12 aa, Artificial sequence
  synthetic peptide
GIPYAQPPLGRL

SEQ ID NO: 3633 - protein, 12 aa, Artificial sequence
  synthetic peptide
IPYAQPPLGRLR

SEQ ID NO: 3634 - protein, 12 aa, Artificial sequence
  synthetic peptide
PYAQPPLGRLRF

SEQ ID NO: 3635 - protein, 12 aa, Artificial sequence
  synthetic peptide
YAQPPLGRLRFK

SEQ ID NO: 3636 - protein, 12 aa, Artificial sequence
  synthetic peptide
AQPPLGRLRFKK

SEQ ID NO: 3637 - protein, 12 aa, Artificial sequence
  synthetic peptide
QPPLGRLRFKKP

SEQ ID NO: 3638 - protein, 12 aa, Artificial sequence
  synthetic peptide
PPLGRLRFKKPQ

SEQ ID NO: 3639 - protein, 12 aa, Artificial sequence
  synthetic peptide
PLGRLRFKKPQS

SEQ ID NO: 3640 - protein, 12 aa, Artificial sequence
  synthetic peptide
LGRLRFKKPQSL

SEQ ID NO: 3641 - protein, 12 aa, Artificial sequence
  synthetic peptide
GRLRFKKPQSLT

SEQ ID NO: 3642 - protein, 12 aa, Artificial sequence
  synthetic peptide
RLRFKKPQSLTK

SEQ ID NO: 3643 - protein, 12 aa, Artificial sequence
  synthetic peptide
LRFKKPQSLTKW

SEQ ID NO: 3644 - protein, 12 aa, Artificial sequence
  synthetic peptide
RFKKPQSLTKWS

SEQ ID NO: 3645 - protein, 12 aa, Artificial sequence
  synthetic peptide
FKKPQSLTKWSD

SEQ ID NO: 3646 - protein, 12 aa, Artificial sequence
  synthetic peptide
KKPQSLTKWSDI

SEQ ID NO: 3647 - protein, 12 aa, Artificial sequence
  synthetic peptide
KPQSLTKWSDIW

SEQ ID NO: 3648 - protein, 12 aa, Artificial sequence
  synthetic peptide
PQSLTKWSDIWN

SEQ ID NO: 3649 - protein, 12 aa, Artificial sequence
  synthetic peptide
QSLTKWSDIWNA

SEQ ID NO: 3650 - protein, 12 aa, Artificial sequence
  synthetic peptide
SLTKWSDIWNAT

SEQ ID NO: 3651 - protein, 12 aa, Artificial sequence
  synthetic peptide
LTKWSDIWNATK

SEQ ID NO: 3652 - protein, 12 aa, Artificial sequence
  synthetic peptide
TKWSDIWNATKY

SEQ ID NO: 3653 - protein, 12 aa, Artificial sequence
  synthetic peptide
KWSDIWNATKYA

SEQ ID NO: 3654 - protein, 12 aa, Artificial sequence
  synthetic peptide
WSDIWNATKYAN

SEQ ID NO: 3655 - protein, 12 aa, Artificial sequence
  synthetic peptide
SDIWNATKYANS

SEQ ID NO: 3656 - protein, 12 aa, Artificial sequence
  synthetic peptide
DIWNATKYANSC

SEQ ID NO: 3657 - protein, 12 aa, Artificial sequence
  synthetic peptide
IWNATKYANSCC

SEQ ID NO: 3658 - protein, 12 aa, Artificial sequence
  synthetic peptide
WNATKYANSCCQ

SEQ ID NO: 3659 - protein, 12 aa, Artificial sequence
  synthetic peptide
NATKYANSCCQN

SEQ ID NO: 3660 - protein, 12 aa, Artificial sequence
  synthetic peptide
ATKYANSCCQNI

SEQ ID NO: 3661 - protein, 12 aa, Artificial sequence
  synthetic peptide
TKYANSCCQNID

SEQ ID NO: 3662 - protein, 12 aa, Artificial sequence
  synthetic peptide
KYANSCCQNIDQ

SEQ ID NO: 3663 - protein, 12 aa, Artificial sequence
  synthetic peptide
YANSCCQNIDQS

SEQ ID NO: 3664 - protein, 12 aa, Artificial sequence
  synthetic peptide
ANSCCQNIDQSF

SEQ ID NO: 3665 - protein, 12 aa, Artificial sequence
  synthetic peptide
NSCCQNIDQSFP

SEQ ID NO: 3666 - protein, 12 aa, Artificial sequence
  synthetic peptide
SCCQNIDQSFPG

SEQ ID NO: 3667 - protein, 12 aa, Artificial sequence
  synthetic peptide
CCQNIDQSFPGF

SEQ ID NO: 3668 - protein, 12 aa, Artificial sequence
  synthetic peptide
CQNIDQSFPGFH

SEQ ID NO: 3669 - protein, 12 aa, Artificial sequence
  synthetic peptide
QNIDQSFPGFHG

SEQ ID NO: 3670 - protein, 12 aa, Artificial sequence
  synthetic peptide
NIDQSFPGFHGS

SEQ ID NO: 3671 - protein, 12 aa, Artificial sequence
  synthetic peptide
IDQSFPGFHGSE

SEQ ID NO: 3672 - protein, 12 aa, Artificial sequence
  synthetic peptide
DQSFPGFHGSEM

SEQ ID NO: 3673 - protein, 12 aa, Artificial sequence
  synthetic peptide
QSFPGFHGSEMW

SEQ ID NO: 3674 - protein, 12 aa, Artificial sequence
  synthetic peptide
SFPGFHGSEMWN

SEQ ID NO: 3675 - protein, 12 aa, Artificial sequence
  synthetic peptide
FPGFHGSEMWNP

SEQ ID NO: 3676 - protein, 12 aa, Artificial sequence
  synthetic peptide
PGFHGSEMWNPN

SEQ ID NO: 3677 - protein, 12 aa, Artificial sequence
  synthetic peptide
GFHGSEMWNPNT

SEQ ID NO: 3678 - protein, 12 aa, Artificial sequence
  synthetic peptide
FHGSEMWNPNTD

SEQ ID NO: 3679 - protein, 12 aa, Artificial sequence
  synthetic peptide
HGSEMWNPNTDL

SEQ ID NO: 3680 - protein, 12 aa, Artificial sequence
  synthetic peptide
GSEMWNPNTDLS

SEQ ID NO: 3681 - protein, 12 aa, Artificial sequence
  synthetic peptide
SEMWNPNTDLSE

SEQ ID NO: 3682 - protein, 12 aa, Artificial sequence
  synthetic peptide
EMWNPNTDLSED

SEQ ID NO: 3683 - protein, 12 aa, Artificial sequence
  synthetic peptide
MWNPNTDLSEDC

SEQ ID NO: 3684 - protein, 12 aa, Artificial sequence
  synthetic peptide
WNPNTDLSEDCL

SEQ ID NO: 3685 - protein, 12 aa, Artificial sequence
  synthetic peptide
NPNTDLSEDCLY

SEQ ID NO: 3686 - protein, 12 aa, Artificial sequence
  synthetic peptide
PNTDLSEDCLYL

SEQ ID NO: 3687 - protein, 12 aa, Artificial sequence
  synthetic peptide
NTDLSEDCLYLN

SEQ ID NO: 3688 - protein, 12 aa, Artificial sequence
  synthetic peptide
TDLSEDCLYLNV

SEQ ID NO: 3689 - protein, 12 aa, Artificial sequence
  synthetic peptide
DLSEDCLYLNVW

SEQ ID NO: 3690 - protein, 12 aa, Artificial sequence
  synthetic peptide
LSEDCLYLNVWI

SEQ ID NO: 3691 - protein, 12 aa, Artificial sequence
  synthetic peptide
SEDCLYLNVWIP

SEQ ID NO: 3692 - protein, 12 aa, Artificial sequence
  synthetic peptide
EDCLYLNVWIPA

SEQ ID NO: 3693 - protein, 12 aa, Artificial sequence
  synthetic peptide
DCLYLNVWIPAP

SEQ ID NO: 3694 - protein, 12 aa, Artificial sequence
  synthetic peptide
CLYLNVWIPAPK

SEQ ID NO: 3695 - protein, 12 aa, Artificial sequence
  synthetic peptide
LYLNVWIPAPKP

SEQ ID NO: 3696 - protein, 12 aa, Artificial sequence
  synthetic peptide
YLNVWIPAPKPK

SEQ ID NO: 3697 - protein, 12 aa, Artificial sequence
  synthetic peptide
LNVWIPAPKPKN

SEQ ID NO: 3698 - protein, 12 aa, Artificial sequence
  synthetic peptide
NVWIPAPKPKNA

SEQ ID NO: 3699 - protein, 12 aa, Artificial sequence
  synthetic peptide
VWIPAPKPKNAT

SEQ ID NO: 3700 - protein, 12 aa, Artificial sequence
  synthetic peptide
WIPAPKPKNATV

SEQ ID NO: 3701 - protein, 12 aa, Artificial sequence
  synthetic peptide
IPAPKPKNATVL

SEQ ID NO: 3702 - protein, 12 aa, Artificial sequence
  synthetic peptide
PAPKPKNATVLI

SEQ ID NO: 3703 - protein, 12 aa, Artificial sequence
  synthetic peptide
APKPKNATVLIW

SEQ ID NO: 3704 - protein, 12 aa, Artificial sequence
  synthetic peptide
PKPKNATVLIWI

SEQ ID NO: 3705 - protein, 12 aa, Artificial sequence
  synthetic peptide
KPKNATVLIWIY

SEQ ID NO: 3706 - protein, 12 aa, Artificial sequence
  synthetic peptide
PKNATVLIWIYG

SEQ ID NO: 3707 - protein, 12 aa, Artificial sequence
  synthetic peptide
KNATVLIWIYGG

SEQ ID NO: 3708 - protein, 12 aa, Artificial sequence
  synthetic peptide
NATVLIWIYGGG

SEQ ID NO: 3709 - protein, 12 aa, Artificial sequence
  synthetic peptide
ATVLIWIYGGGF

SEQ ID NO: 3710 - protein, 12 aa, Artificial sequence
  synthetic peptide
TVLIWIYGGGFQ

SEQ ID NO: 3711 - protein, 12 aa, Artificial sequence
  synthetic peptide
VLIWIYGGGFQT

SEQ ID NO: 3712 - protein, 12 aa, Artificial sequence
  synthetic peptide
LIWIYGGGFQTG

SEQ ID NO: 3713 - protein, 12 aa, Artificial sequence
  synthetic peptide
IWIYGGGFQTGT

SEQ ID NO: 3714 - protein, 12 aa, Artificial sequence
  synthetic peptide
WIYGGGFQTGTS

SEQ ID NO: 3715 - protein, 12 aa, Artificial sequence
  synthetic peptide
IYGGGFQTGTSS

SEQ ID NO: 3716 - protein, 12 aa, Artificial sequence
  synthetic peptide
YGGGFQTGTSSL

SEQ ID NO: 3717 - protein, 12 aa, Artificial sequence
  synthetic peptide
GGGFQTGTSSLH

SEQ ID NO: 3718 - protein, 12 aa, Artificial sequence
  synthetic peptide
GGFQTGTSSLHV

SEQ ID NO: 3719 - protein, 12 aa, Artificial sequence
  synthetic peptide
GFQTGTSSLHVY

SEQ ID NO: 3720 - protein, 12 aa, Artificial sequence
  synthetic peptide
FQTGTSSLHVYD

SEQ ID NO: 3721 - protein, 12 aa, Artificial sequence
  synthetic peptide
QTGTSSLHVYDG

SEQ ID NO: 3722 - protein, 12 aa, Artificial sequence
  synthetic peptide
TGTSSLHVYDGK

SEQ ID NO: 3723 - protein, 12 aa, Artificial sequence
  synthetic peptide
GTSSLHVYDGKF

SEQ ID NO: 3724 - protein, 12 aa, Artificial sequence
  synthetic peptide
TSSLHVYDGKFL

SEQ ID NO: 3725 - protein, 12 aa, Artificial sequence
  synthetic peptide
SSLHVYDGKFLA

SEQ ID NO: 3726 - protein, 12 aa, Artificial sequence
  synthetic peptide
SLHVYDGKFLAR

SEQ ID NO: 3727 - protein, 12 aa, Artificial sequence
  synthetic peptide
LHVYDGKFLARV

SEQ ID NO: 3728 - protein, 12 aa, Artificial sequence
  synthetic peptide
HVYDGKFLARVE

SEQ ID NO: 3729 - protein, 12 aa, Artificial sequence
  synthetic peptide
VYDGKFLARVER

SEQ ID NO: 3730 - protein, 12 aa, Artificial sequence
  synthetic peptide
YDGKFLARVERV

SEQ ID NO: 3731 - protein, 12 aa, Artificial sequence
  synthetic peptide
DGKFLARVERVI

SEQ ID NO: 3732 - protein, 12 aa, Artificial sequence
  synthetic peptide
GKFLARVERVIV

SEQ ID NO: 3733 - protein, 12 aa, Artificial sequence
  synthetic peptide
KFLARVERVIVV

SEQ ID NO: 3734 - protein, 12 aa, Artificial sequence
  synthetic peptide
FLARVERVIVVS

SEQ ID NO: 3735 - protein, 12 aa, Artificial sequence
  synthetic peptide
LARVERVIVVSM

SEQ ID NO: 3736 - protein, 12 aa, Artificial sequence
  synthetic peptide
ARVERVIVVSMN

SEQ ID NO: 3737 - protein, 12 aa, Artificial sequence
  synthetic peptide
RVERVIVVSMNY

SEQ ID NO: 3738 - protein, 12 aa, Artificial sequence
  synthetic peptide
VERVIVVSMNYR

SEQ ID NO: 3739 - protein, 12 aa, Artificial sequence
  synthetic peptide
ERVIVVSMNYRV

SEQ ID NO: 3740 - protein, 12 aa, Artificial sequence
  synthetic peptide
RVIVVSMNYRVG

SEQ ID NO: 3741 - protein, 12 aa, Artificial sequence
  synthetic peptide
VIVVSMNYRVGA

SEQ ID NO: 3742 - protein, 12 aa, Artificial sequence
  synthetic peptide
IVVSMNYRVGAL

SEQ ID NO: 3743 - protein, 12 aa, Artificial sequence
  synthetic peptide
VVSMNYRVGALG

SEQ ID NO: 3744 - protein, 12 aa, Artificial sequence
  synthetic peptide
VSMNYRVGALGF

SEQ ID NO: 3745 - protein, 12 aa, Artificial sequence
  synthetic peptide
SMNYRVGALGFL

SEQ ID NO: 3746 - protein, 12 aa, Artificial sequence
  synthetic peptide
MNYRVGALGFLA

SEQ ID NO: 3747 - protein, 12 aa, Artificial sequence
  synthetic peptide
NYRVGALGFLAL

SEQ ID NO: 3748 - protein, 12 aa, Artificial sequence
  synthetic peptide
YRVGALGFLALP

SEQ ID NO: 3749 - protein, 12 aa, Artificial sequence
  synthetic peptide
RVGALGFLALPG

SEQ ID NO: 3750 - protein, 12 aa, Artificial sequence
  synthetic peptide
VGALGFLALPGN

SEQ ID NO: 3751 - protein, 12 aa, Artificial sequence
  synthetic peptide
GALGFLALPGNP

SEQ ID NO: 3752 - protein, 12 aa, Artificial sequence
  synthetic peptide
ALGFLALPGNPE

SEQ ID NO: 3753 - protein, 12 aa, Artificial sequence
  synthetic peptide
LGFLALPGNPEA

SEQ ID NO: 3754 - protein, 12 aa, Artificial sequence
  synthetic peptide
GFLALPGNPEAP

SEQ ID NO: 3755 - protein, 12 aa, Artificial sequence
  synthetic peptide
FLALPGNPEAPG

SEQ ID NO: 3756 - protein, 12 aa, Artificial sequence
  synthetic peptide
LALPGNPEAPGN

SEQ ID NO: 3757 - protein, 12 aa, Artificial sequence
  synthetic peptide
ALPGNPEAPGNM

SEQ ID NO: 3758 - protein, 12 aa, Artificial sequence
  synthetic peptide
LPGNPEAPGNMG

SEQ ID NO: 3759 - protein, 12 aa, Artificial sequence
  synthetic peptide
PGNPEAPGNMGL

SEQ ID NO: 3760 - protein, 12 aa, Artificial sequence
  synthetic peptide
GNPEAPGNMGLF

SEQ ID NO: 3761 - protein, 12 aa, Artificial sequence
  synthetic peptide
NPEAPGNMGLFD

SEQ ID NO: 3762 - protein, 12 aa, Artificial sequence
  synthetic peptide
PEAPGNMGLFDQ

SEQ ID NO: 3763 - protein, 12 aa, Artificial sequence
  synthetic peptide
EAPGNMGLFDQQ

SEQ ID NO: 3764 - protein, 12 aa, Artificial sequence
  synthetic peptide
APGNMGLFDQQL

SEQ ID NO: 3765 - protein, 12 aa, Artificial sequence
  synthetic peptide
PGNMGLFDQQLA

SEQ ID NO: 3766 - protein, 12 aa, Artificial sequence
  synthetic peptide
GNMGLFDQQLAL

SEQ ID NO: 3767 - protein, 12 aa, Artificial sequence
  synthetic peptide
NMGLFDQQLALQ

SEQ ID NO: 3768 - protein, 12 aa, Artificial sequence
  synthetic peptide
MGLFDQQLALQW

SEQ ID NO: 3769 - protein, 12 aa, Artificial sequence
  synthetic peptide
GLFDQQLALQWV

SEQ ID NO: 3770 - protein, 12 aa, Artificial sequence
  synthetic peptide
LFDQQLALQWVQ

SEQ ID NO: 3771 - protein, 12 aa, Artificial sequence
  synthetic peptide
FDQQLALQWVQK

SEQ ID NO: 3772 - protein, 12 aa, Artificial sequence
  synthetic peptide
DQQLALQWVQKN

SEQ ID NO: 3773 - protein, 12 aa, Artificial sequence
  synthetic peptide
QQLALQWVQKNI

SEQ ID NO: 3774 - protein, 12 aa, Artificial sequence
  synthetic peptide
QLALQWVQKNIA

SEQ ID NO: 3775 - protein, 12 aa, Artificial sequence
  synthetic peptide
LALQWVQKNIAA

SEQ ID NO: 3776 - protein, 12 aa, Artificial sequence
  synthetic peptide
ALQWVQKNIAAF

SEQ ID NO: 3777 - protein, 12 aa, Artificial sequence
  synthetic peptide
LQWVQKNIAAFG

SEQ ID NO: 3778 - protein, 12 aa, Artificial sequence
  synthetic peptide
QWVQKNIAAFGG

SEQ ID NO: 3779 - protein, 12 aa, Artificial sequence
  synthetic peptide
WVQKNIAAFGGN

SEQ ID NO: 3780 - protein, 12 aa, Artificial sequence
  synthetic peptide
VQKNIAAFGGNP

SEQ ID NO: 3781 - protein, 12 aa, Artificial sequence
  synthetic peptide
QKNIAAFGGNPK

SEQ ID NO: 3782 - protein, 12 aa, Artificial sequence
  synthetic peptide
KNIAAFGGNPKS

SEQ ID NO: 3783 - protein, 12 aa, Artificial sequence
  synthetic peptide
NIAAFGGNPKSV

SEQ ID NO: 3784 - protein, 12 aa, Artificial sequence
  synthetic peptide
IAAFGGNPKSVT

SEQ ID NO: 3785 - protein, 12 aa, Artificial sequence
  synthetic peptide
AAFGGNPKSVTL

SEQ ID NO: 3786 - protein, 12 aa, Artificial sequence
  synthetic peptide
AFGGNPKSVTLF

SEQ ID NO: 3787 - protein, 12 aa, Artificial sequence
  synthetic peptide
FGGNPKSVTLFG

SEQ ID NO: 3788 - protein, 12 aa, Artificial sequence
  synthetic peptide
GGNPKSVTLFGE

SEQ ID NO: 3789 - protein, 12 aa, Artificial sequence
  synthetic peptide
GNPKSVTLFGES

SEQ ID NO: 3790 - protein, 12 aa, Artificial sequence
  synthetic peptide
NPKSVTLFGESA

SEQ ID NO: 3791 - protein, 12 aa, Artificial sequence
  synthetic peptide
PKSVTLFGESAG

SEQ ID NO: 3792 - protein, 12 aa, Artificial sequence
  synthetic peptide
KSVTLFGESAGA

SEQ ID NO: 3793 - protein, 12 aa, Artificial sequence
  synthetic peptide
SVTLFGESAGAA

SEQ ID NO: 3794 - protein, 12 aa, Artificial sequence
  synthetic peptide
VTLFGESAGAAS

SEQ ID NO: 3795 - protein, 12 aa, Artificial sequence
  synthetic peptide
TLFGESAGAASV

SEQ ID NO: 3796 - protein, 12 aa, Artificial sequence
  synthetic peptide
LFGESAGAASVS

SEQ ID NO: 3797 - protein, 12 aa, Artificial sequence
  synthetic peptide
FGESAGAASVSL

SEQ ID NO: 3798 - protein, 12 aa, Artificial sequence
  synthetic peptide
GESAGAASVSLH

SEQ ID NO: 3799 - protein, 12 aa, Artificial sequence
  synthetic peptide
ESAGAASVSLHL

SEQ ID NO: 3800 - protein, 12 aa, Artificial sequence
  synthetic peptide
SAGAASVSLHLL

SEQ ID NO: 3801 - protein, 12 aa, Artificial sequence
  synthetic peptide
AGAASVSLHLLS

SEQ ID NO: 3802 - protein, 12 aa, Artificial sequence
  synthetic peptide
GAASVSLHLLSP

SEQ ID NO: 3803 - protein, 12 aa, Artificial sequence
  synthetic peptide
AASVSLHLLSPG

SEQ ID NO: 3804 - protein, 12 aa, Artificial sequence
  synthetic peptide
ASVSLHLLSPGS

SEQ ID NO: 3805 - protein, 12 aa, Artificial sequence
  synthetic peptide
SVSLHLLSPGSH

SEQ ID NO: 3806 - protein, 12 aa, Artificial sequence
  synthetic peptide
VSLHLLSPGSHS

SEQ ID NO: 3807 - protein, 12 aa, Artificial sequence
  synthetic peptide
SLHLLSPGSHSL

SEQ ID NO: 3808 - protein, 12 aa, Artificial sequence
  synthetic peptide
LHLLSPGSHSLF

SEQ ID NO: 3809 - protein, 12 aa, Artificial sequence
  synthetic peptide
HLLSPGSHSLFT

SEQ ID NO: 3810 - protein, 12 aa, Artificial sequence
  synthetic peptide
LLSPGSHSLFTR

SEQ ID NO: 3811 - protein, 12 aa, Artificial sequence
  synthetic peptide
LSPGSHSLFTRA

SEQ ID NO: 3812 - protein, 12 aa, Artificial sequence
  synthetic peptide
SPGSHSLFTRAI

SEQ ID NO: 3813 - protein, 12 aa, Artificial sequence
  synthetic peptide
PGSHSLFTRAIL

SEQ ID NO: 3814 - protein, 12 aa, Artificial sequence
  synthetic peptide
GSHSLFTRAILQ

SEQ ID NO: 3815 - protein, 12 aa, Artificial sequence
  synthetic peptide
SHSLFTRAILQS

SEQ ID NO: 3816 - protein, 12 aa, Artificial sequence
  synthetic peptide
HSLFTRAILQSG

SEQ ID NO: 3817 - protein, 12 aa, Artificial sequence
  synthetic peptide
SLFTRAILQSGS

SEQ ID NO: 3818 - protein, 12 aa, Artificial sequence
  synthetic peptide
LFTRAILQSGSF

SEQ ID NO: 3819 - protein, 12 aa, Artificial sequence
  synthetic peptide
FTRAILQSGSFN

SEQ ID NO: 3820 - protein, 12 aa, Artificial sequence
  synthetic peptide
TRAILQSGSFNA

SEQ ID NO: 3821 - protein, 12 aa, Artificial sequence
  synthetic peptide
RAILQSGSFNAP

SEQ ID NO: 3822 - protein, 12 aa, Artificial sequence
  synthetic peptide
AILQSGSFNAPW

SEQ ID NO: 3823 - protein, 12 aa, Artificial sequence
  synthetic peptide
ILQSGSFNAPWA

SEQ ID NO: 3824 - protein, 12 aa, Artificial sequence
  synthetic peptide
LQSGSFNAPWAV

SEQ ID NO: 3825 - protein, 12 aa, Artificial sequence
  synthetic peptide
QSGSFNAPWAVT

SEQ ID NO: 3826 - protein, 12 aa, Artificial sequence
  synthetic peptide
SGSFNAPWAVTS

SEQ ID NO: 3827 - protein, 12 aa, Artificial sequence
  synthetic peptide
GSFNAPWAVTSL

SEQ ID NO: 3828 - protein, 12 aa, Artificial sequence
  synthetic peptide
SFNAPWAVTSLY

SEQ ID NO: 3829 - protein, 12 aa, Artificial sequence
  synthetic peptide
FNAPWAVTSLYE

SEQ ID NO: 3830 - protein, 12 aa, Artificial sequence
  synthetic peptide
NAPWAVTSLYEA

SEQ ID NO: 3831 - protein, 12 aa, Artificial sequence
  synthetic peptide
APWAVTSLYEAR

SEQ ID NO: 3832 - protein, 12 aa, Artificial sequence
  synthetic peptide
PWAVTSLYEARN

SEQ ID NO: 3833 - protein, 12 aa, Artificial sequence
  synthetic peptide
WAVTSLYEARNR

SEQ ID NO: 3834 - protein, 12 aa, Artificial sequence
  synthetic peptide
AVTSLYEARNRT

SEQ ID NO: 3835 - protein, 12 aa, Artificial sequence
  synthetic peptide
VTSLYEARNRTL

SEQ ID NO: 3836 - protein, 12 aa, Artificial sequence
  synthetic peptide
TSLYEARNRTLN

SEQ ID NO: 3837 - protein, 12 aa, Artificial sequence
  synthetic peptide
SLYEARNRTLNL

SEQ ID NO: 3838 - protein, 12 aa, Artificial sequence
  synthetic peptide
LYEARNRTLNLA

SEQ ID NO: 3839 - protein, 12 aa, Artificial sequence
  synthetic peptide
YEARNRTLNLAK

SEQ ID NO: 3840 - protein, 12 aa, Artificial sequence
  synthetic peptide
EARNRTLNLAKL

SEQ ID NO: 3841 - protein, 12 aa, Artificial sequence
  synthetic peptide
ARNRTLNLAKLT

SEQ ID NO: 3842 - protein, 12 aa, Artificial sequence
  synthetic peptide
RNRTLNLAKLTG

SEQ ID NO: 3843 - protein, 12 aa, Artificial sequence
  synthetic peptide
NRTLNLAKLTGC

SEQ ID NO: 3844 - protein, 12 aa, Artificial sequence
  synthetic peptide
RTLNLAKLTGCS

SEQ ID NO: 3845 - protein, 12 aa, Artificial sequence
  synthetic peptide
TLNLAKLTGCSR

SEQ ID NO: 3846 - protein, 12 aa, Artificial sequence
  synthetic peptide
LNLAKLTGCSRE

SEQ ID NO: 3847 - protein, 12 aa, Artificial sequence
  synthetic peptide
NLAKLTGCSREN

SEQ ID NO: 3848 - protein, 12 aa, Artificial sequence
  synthetic peptide
LAKLTGCSRENE

SEQ ID NO: 3849 - protein, 12 aa, Artificial sequence
  synthetic peptide
AKLTGCSRENET

SEQ ID NO: 3850 - protein, 12 aa, Artificial sequence
  synthetic peptide
KLTGCSRENETE

SEQ ID NO: 3851 - protein, 12 aa, Artificial sequence
  synthetic peptide
LTGCSRENETEI

SEQ ID NO: 3852 - protein, 12 aa, Artificial sequence
  synthetic peptide
TGCSRENETEII

SEQ ID NO: 3853 - protein, 12 aa, Artificial sequence
  synthetic peptide
GCSRENETEIIK

SEQ ID NO: 3854 - protein, 12 aa, Artificial sequence
  synthetic peptide
CSRENETEIIKC

SEQ ID NO: 3855 - protein, 12 aa, Artificial sequence
  synthetic peptide
SRENETEIIKCL

SEQ ID NO: 3856 - protein, 12 aa, Artificial sequence
  synthetic peptide
RENETEIIKCLR

SEQ ID NO: 3857 - protein, 12 aa, Artificial sequence
  synthetic peptide
ENETEIIKCLRN

SEQ ID NO: 3858 - protein, 12 aa, Artificial sequence
  synthetic peptide
NETEIIKCLRNK

SEQ ID NO: 3859 - protein, 12 aa, Artificial sequence
  synthetic peptide
ETEIIKCLRNKD

SEQ ID NO: 3860 - protein, 12 aa, Artificial sequence
  synthetic peptide
TEIIKCLRNKDP

SEQ ID NO: 3861 - protein, 12 aa, Artificial sequence
  synthetic peptide
EIIKCLRNKDPQ

SEQ ID NO: 3862 - protein, 12 aa, Artificial sequence
  synthetic peptide
IIKCLRNKDPQE

SEQ ID NO: 3863 - protein, 12 aa, Artificial sequence
  synthetic peptide
IKCLRNKDPQEI

SEQ ID NO: 3864 - protein, 12 aa, Artificial sequence
  synthetic peptide
KCLRNKDPQEIL

SEQ ID NO: 3865 - protein, 12 aa, Artificial sequence
  synthetic peptide
CLRNKDPQEILL

SEQ ID NO: 3866 - protein, 12 aa, Artificial sequence
  synthetic peptide
LRNKDPQEILLN

SEQ ID NO: 3867 - protein, 12 aa, Artificial sequence
  synthetic peptide
RNKDPQEILLNE

SEQ ID NO: 3868 - protein, 12 aa, Artificial sequence
  synthetic peptide
NKDPQEILLNEA

SEQ ID NO: 3869 - protein, 12 aa, Artificial sequence
  synthetic peptide
KDPQEILLNEAF

SEQ ID NO: 3870 - protein, 12 aa, Artificial sequence
  synthetic peptide
DPQEILLNEAFV

SEQ ID NO: 3871 - protein, 12 aa, Artificial sequence
  synthetic peptide
PQEILLNEAFVV

SEQ ID NO: 3872 - protein, 12 aa, Artificial sequence
  synthetic peptide
QEILLNEAFVVP

SEQ ID NO: 3873 - protein, 12 aa, Artificial sequence
  synthetic peptide
EILLNEAFVVPY

SEQ ID NO: 3874 - protein, 12 aa, Artificial sequence
  synthetic peptide
ILLNEAFVVPYG

SEQ ID NO: 3875 - protein, 12 aa, Artificial sequence
  synthetic peptide
LLNEAFVVPYGT

SEQ ID NO: 3876 - protein, 12 aa, Artificial sequence
  synthetic peptide
LNEAFVVPYGTP

SEQ ID NO: 3877 - protein, 12 aa, Artificial sequence
  synthetic peptide
NEAFVVPYGTPL

SEQ ID NO: 3878 - protein, 12 aa, Artificial sequence
  synthetic peptide
EAFVVPYGTPLS

SEQ ID NO: 3879 - protein, 12 aa, Artificial sequence
  synthetic peptide
AFVVPYGTPLSV

SEQ ID NO: 3880 - protein, 12 aa, Artificial sequence
  synthetic peptide
FVVPYGTPLSVN

SEQ ID NO: 3881 - protein, 12 aa, Artificial sequence
  synthetic peptide
VVPYGTPLSVNF

SEQ ID NO: 3882 - protein, 12 aa, Artificial sequence
  synthetic peptide
VPYGTPLSVNFG

SEQ ID NO: 3883 - protein, 12 aa, Artificial sequence
  synthetic peptide
PYGTPLSVNFGP

SEQ ID NO: 3884 - protein, 12 aa, Artificial sequence
  synthetic peptide
YGTPLSVNFGPT

SEQ ID NO: 3885 - protein, 12 aa, Artificial sequence
  synthetic peptide
GTPLSVNFGPTV

SEQ ID NO: 3886 - protein, 12 aa, Artificial sequence
  synthetic peptide
TPLSVNFGPTVD

SEQ ID NO: 3887 - protein, 12 aa, Artificial sequence
  synthetic peptide
PLSVNFGPTVDG

SEQ ID NO: 3888 - protein, 12 aa, Artificial sequence
  synthetic peptide
LSVNFGPTVDGD

SEQ ID NO: 3889 - protein, 12 aa, Artificial sequence
  synthetic peptide
SVNFGPTVDGDF

SEQ ID NO: 3890 - protein, 12 aa, Artificial sequence
  synthetic peptide
VNFGPTVDGDFL

SEQ ID NO: 3891 - protein, 12 aa, Artificial sequence
  synthetic peptide
NFGPTVDGDFLT

SEQ ID NO: 3892 - protein, 12 aa, Artificial sequence
  synthetic peptide
FGPTVDGDFLTD

SEQ ID NO: 3893 - protein, 12 aa, Artificial sequence
  synthetic peptide
GPTVDGDFLTDM

SEQ ID NO: 3894 - protein, 12 aa, Artificial sequence
  synthetic peptide
PTVDGDFLTDMP

SEQ ID NO: 3895 - protein, 12 aa, Artificial sequence
  synthetic peptide
TVDGDFLTDMPD

SEQ ID NO: 3896 - protein, 12 aa, Artificial sequence
  synthetic peptide
VDGDFLTDMPDI

SEQ ID NO: 3897 - protein, 12 aa, Artificial sequence
  synthetic peptide
DGDFLTDMPDIL

SEQ ID NO: 3898 - protein, 12 aa, Artificial sequence
  synthetic peptide
GDFLTDMPDILL

SEQ ID NO: 3899 - protein, 12 aa, Artificial sequence
  synthetic peptide
DFLTDMPDILLE

SEQ ID NO: 3900 - protein, 12 aa, Artificial sequence
  synthetic peptide
FLTDMPDILLEL

SEQ ID NO: 3901 - protein, 12 aa, Artificial sequence
  synthetic peptide
LTDMPDILLELG

SEQ ID NO: 3902 - protein, 12 aa, Artificial sequence
  synthetic peptide
TDMPDILLELGQ

SEQ ID NO: 3903 - protein, 12 aa, Artificial sequence
  synthetic peptide
DMPDILLELGQF

SEQ ID NO: 3904 - protein, 12 aa, Artificial sequence
  synthetic peptide
MPDILLELGQFK

SEQ ID NO: 3905 - protein, 12 aa, Artificial sequence
  synthetic peptide
PDILLELGQFKK

SEQ ID NO: 3906 - protein, 12 aa, Artificial sequence
  synthetic peptide
DILLELGQFKKT

SEQ ID NO: 3907 - protein, 12 aa, Artificial sequence
  synthetic peptide
ILLELGQFKKTQ

SEQ ID NO: 3908 - protein, 12 aa, Artificial sequence
  synthetic peptide
LLELGQFKKTQI

SEQ ID NO: 3909 - protein, 12 aa, Artificial sequence
  synthetic peptide
LELGQFKKTQIL

SEQ ID NO: 3910 - protein, 12 aa, Artificial sequence
  synthetic peptide
ELGQFKKTQILV

SEQ ID NO: 3911 - protein, 12 aa, Artificial sequence
  synthetic peptide
LGQFKKTQILVG

SEQ ID NO: 3912 - protein, 12 aa, Artificial sequence
  synthetic peptide
GQFKKTQILVGV

SEQ ID NO: 3913 - protein, 12 aa, Artificial sequence
  synthetic peptide
QFKKTQILVGVN

SEQ ID NO: 3914 - protein, 12 aa, Artificial sequence
  synthetic peptide
FKKTQILVGVNK

SEQ ID NO: 3915 - protein, 12 aa, Artificial sequence
  synthetic peptide
KKTQILVGVNKD

SEQ ID NO: 3916 - protein, 12 aa, Artificial sequence
  synthetic peptide
KTQILVGVNKDE

SEQ ID NO: 3917 - protein, 12 aa, Artificial sequence
  synthetic peptide
TQILVGVNKDEG

SEQ ID NO: 3918 - protein, 12 aa, Artificial sequence
  synthetic peptide
QILVGVNKDEGT

SEQ ID NO: 3919 - protein, 12 aa, Artificial sequence
  synthetic peptide
ILVGVNKDEGTA

SEQ ID NO: 3920 - protein, 12 aa, Artificial sequence
  synthetic peptide
LVGVNKDEGTAF

SEQ ID NO: 3921 - protein, 12 aa, Artificial sequence
  synthetic peptide
VGVNKDEGTAFL

SEQ ID NO: 3922 - protein, 12 aa, Artificial sequence
  synthetic peptide
GVNKDEGTAFLV

SEQ ID NO: 3923 - protein, 12 aa, Artificial sequence
  synthetic peptide
VNKDEGTAFLVY

SEQ ID NO: 3924 - protein, 12 aa, Artificial sequence
  synthetic peptide
NKDEGTAFLVYG

SEQ ID NO: 3925 - protein, 12 aa, Artificial sequence
  synthetic peptide
KDEGTAFLVYGA

SEQ ID NO: 3926 - protein, 12 aa, Artificial sequence
  synthetic peptide
DEGTAFLVYGAP

SEQ ID NO: 3927 - protein, 12 aa, Artificial sequence
  synthetic peptide
EGTAFLVYGAPG

SEQ ID NO: 3928 - protein, 12 aa, Artificial sequence
  synthetic peptide
GTAFLVYGAPGF

SEQ ID NO: 3929 - protein, 12 aa, Artificial sequence
  synthetic peptide
TAFLVYGAPGFS

SEQ ID NO: 3930 - protein, 12 aa, Artificial sequence
  synthetic peptide
AFLVYGAPGFSK

SEQ ID NO: 3931 - protein, 12 aa, Artificial sequence
  synthetic peptide
FLVYGAPGFSKD

SEQ ID NO: 3932 - protein, 12 aa, Artificial sequence
  synthetic peptide
LVYGAPGFSKDN

SEQ ID NO: 3933 - protein, 12 aa, Artificial sequence
  synthetic peptide
VYGAPGFSKDNN

SEQ ID NO: 3934 - protein, 12 aa, Artificial sequence
  synthetic peptide
YGAPGFSKDNNS

SEQ ID NO: 3935 - protein, 12 aa, Artificial sequence
  synthetic peptide
GAPGFSKDNNSI

SEQ ID NO: 3936 - protein, 12 aa, Artificial sequence
  synthetic peptide
APGFSKDNNSII

SEQ ID NO: 3937 - protein, 12 aa, Artificial sequence
  synthetic peptide
PGFSKDNNSIIT

SEQ ID NO: 3938 - protein, 12 aa, Artificial sequence
  synthetic peptide
GFSKDNNSIITR

SEQ ID NO: 3939 - protein, 12 aa, Artificial sequence
  synthetic peptide
FSKDNNSIITRK

SEQ ID NO: 3940 - protein, 12 aa, Artificial sequence
  synthetic peptide
SKDNNSIITRKE

SEQ ID NO: 3941 - protein, 12 aa, Artificial sequence
  synthetic peptide
KDNNSIITRKEF

SEQ ID NO: 3942 - protein, 12 aa, Artificial sequence
  synthetic peptide
DNNSIITRKEFQ

SEQ ID NO: 3943 - protein, 12 aa, Artificial sequence
  synthetic peptide
NNSIITRKEFQE

SEQ ID NO: 3944 - protein, 12 aa, Artificial sequence
  synthetic peptide
NSIITRKEFQEG

SEQ ID NO: 3945 - protein, 12 aa, Artificial sequence
  synthetic peptide
SIITRKEFQEGL

SEQ ID NO: 3946 - protein, 12 aa, Artificial sequence
  synthetic peptide
IITRKEFQEGLK

SEQ ID NO: 3947 - protein, 12 aa, Artificial sequence
  synthetic peptide
ITRKEFQEGLKI

SEQ ID NO: 3948 - protein, 12 aa, Artificial sequence
  synthetic peptide
TRKEFQEGLKIF

SEQ ID NO: 3949 - protein, 12 aa, Artificial sequence
  synthetic peptide
RKEFQEGLKIFF

SEQ ID NO: 3950 - protein, 12 aa, Artificial sequence
  synthetic peptide
KEFQEGLKIFFP

SEQ ID NO: 3951 - protein, 12 aa, Artificial sequence
  synthetic peptide
EFQEGLKIFFPG

SEQ ID NO: 3952 - protein, 12 aa, Artificial sequence
  synthetic peptide
FQEGLKIFFPGV

SEQ ID NO: 3953 - protein, 12 aa, Artificial sequence
  synthetic peptide
QEGLKIFFPGVS

SEQ ID NO: 3954 - protein, 12 aa, Artificial sequence
  synthetic peptide
EGLKIFFPGVSE

SEQ ID NO: 3955 - protein, 12 aa, Artificial sequence
  synthetic peptide
GLKIFFPGVSEF

SEQ ID NO: 3956 - protein, 12 aa, Artificial sequence
  synthetic peptide
LKIFFPGVSEFG

SEQ ID NO: 3957 - protein, 12 aa, Artificial sequence
  synthetic peptide
KIFFPGVSEFGK

SEQ ID NO: 3958 - protein, 12 aa, Artificial sequence
  synthetic peptide
IFFPGVSEFGKE

SEQ ID NO: 3959 - protein, 12 aa, Artificial sequence
  synthetic peptide
FFPGVSEFGKES

SEQ ID NO: 3960 - protein, 12 aa, Artificial sequence
  synthetic peptide
FPGVSEFGKESI

SEQ ID NO: 3961 - protein, 12 aa, Artificial sequence
  synthetic peptide
PGVSEFGKESIL

SEQ ID NO: 3962 - protein, 12 aa, Artificial sequence
  synthetic peptide
GVSEFGKESILF

SEQ ID NO: 3963 - protein, 12 aa, Artificial sequence
  synthetic peptide
VSEFGKESILFH

SEQ ID NO: 3964 - protein, 12 aa, Artificial sequence
  synthetic peptide
SEFGKESILFHY

SEQ ID NO: 3965 - protein, 12 aa, Artificial sequence
  synthetic peptide
EFGKESILFHYT

SEQ ID NO: 3966 - protein, 12 aa, Artificial sequence
  synthetic peptide
FGKESILFHYTD

SEQ ID NO: 3967 - protein, 12 aa, Artificial sequence
  synthetic peptide
GKESILFHYTDW

SEQ ID NO: 3968 - protein, 12 aa, Artificial sequence
  synthetic peptide
KESILFHYTDWV

SEQ ID NO: 3969 - protein, 12 aa, Artificial sequence
  synthetic peptide
ESILFHYTDWVD

SEQ ID NO: 3970 - protein, 12 aa, Artificial sequence
  synthetic peptide
SILFHYTDWVDD

SEQ ID NO: 3971 - protein, 12 aa, Artificial sequence
  synthetic peptide
ILFHYTDWVDDQ

SEQ ID NO: 3972 - protein, 12 aa, Artificial sequence
  synthetic peptide
LFHYTDWVDDQR

SEQ ID NO: 3973 - protein, 12 aa, Artificial sequence
  synthetic peptide
FHYTDWVDDQRP

SEQ ID NO: 3974 - protein, 12 aa, Artificial sequence
  synthetic peptide
HYTDWVDDQRPE

SEQ ID NO: 3975 - protein, 12 aa, Artificial sequence
  synthetic peptide
YTDWVDDQRPEN

SEQ ID NO: 3976 - protein, 12 aa, Artificial sequence
  synthetic peptide
TDWVDDQRPENY

SEQ ID NO: 3977 - protein, 12 aa, Artificial sequence
  synthetic peptide
DWVDDQRPENYR

SEQ ID NO: 3978 - protein, 12 aa, Artificial sequence
  synthetic peptide
WVDDQRPENYRE

SEQ ID NO: 3979 - protein, 12 aa, Artificial sequence
  synthetic peptide
VDDQRPENYREA

SEQ ID NO: 3980 - protein, 12 aa, Artificial sequence
  synthetic peptide
DDQRPENYREAL

SEQ ID NO: 3981 - protein, 12 aa, Artificial sequence
  synthetic peptide
DQRPENYREALG

SEQ ID NO: 3982 - protein, 12 aa, Artificial sequence
  synthetic peptide
QRPENYREALGD

SEQ ID NO: 3983 - protein, 12 aa, Artificial sequence
  synthetic peptide
RPENYREALGDV

SEQ ID NO: 3984 - protein, 12 aa, Artificial sequence
  synthetic peptide
PENYREALGDVV

SEQ ID NO: 3985 - protein, 12 aa, Artificial sequence
  synthetic peptide
ENYREALGDVVG

SEQ ID NO: 3986 - protein, 12 aa, Artificial sequence
  synthetic peptide
NYREALGDVVGD

SEQ ID NO: 3987 - protein, 12 aa, Artificial sequence
  synthetic peptide
YREALGDVVGDY

SEQ ID NO: 3988 - protein, 12 aa, Artificial sequence
  synthetic peptide
REALGDVVGDYN

SEQ ID NO: 3989 - protein, 12 aa, Artificial sequence
  synthetic peptide
EALGDVVGDYNF

SEQ ID NO: 3990 - protein, 12 aa, Artificial sequence
  synthetic peptide
ALGDVVGDYNFI

SEQ ID NO: 3991 - protein, 12 aa, Artificial sequence
  synthetic peptide
LGDVVGDYNFIC

SEQ ID NO: 3992 - protein, 12 aa, Artificial sequence
  synthetic peptide
GDVVGDYNFICP

SEQ ID NO: 3993 - protein, 12 aa, Artificial sequence
  synthetic peptide
DVVGDYNFICPA

SEQ ID NO: 3994 - protein, 12 aa, Artificial sequence
  synthetic peptide
VVGDYNFICPAL

SEQ ID NO: 3995 - protein, 12 aa, Artificial sequence
  synthetic peptide
VGDYNFICPALE

SEQ ID NO: 3996 - protein, 12 aa, Artificial sequence
  synthetic peptide
GDYNFICPALEF

SEQ ID NO: 3997 - protein, 12 aa, Artificial sequence
  synthetic peptide
DYNFICPALEFT

SEQ ID NO: 3998 - protein, 12 aa, Artificial sequence
  synthetic peptide
YNFICPALEFTK

SEQ ID NO: 3999 - protein, 12 aa, Artificial sequence
  synthetic peptide
NFICPALEFTKK

SEQ ID NO: 4000 - protein, 12 aa, Artificial sequence
  synthetic peptide
FICPALEFTKKF

SEQ ID NO: 4001 - protein, 12 aa, Artificial sequence
  synthetic peptide
ICPALEFTKKFS

SEQ ID NO: 4002 - protein, 12 aa, Artificial sequence
  synthetic peptide
CPALEFTKKFSE

SEQ ID NO: 4003 - protein, 12 aa, Artificial sequence
  synthetic peptide
PALEFTKKFSEW

SEQ ID NO: 4004 - protein, 12 aa, Artificial sequence
  synthetic peptide
ALEFTKKFSEWG

SEQ ID NO: 4005 - protein, 12 aa, Artificial sequence
  synthetic peptide
LEFTKKFSEWGN

SEQ ID NO: 4006 - protein, 12 aa, Artificial sequence
  synthetic peptide
EFTKKFSEWGNN

SEQ ID NO: 4007 - protein, 12 aa, Artificial sequence
  synthetic peptide
FTKKFSEWGNNA

SEQ ID NO: 4008 - protein, 12 aa, Artificial sequence
  synthetic peptide
TKKFSEWGNNAF

SEQ ID NO: 4009 - protein, 12 aa, Artificial sequence
  synthetic peptide
KKFSEWGNNAFF

SEQ ID NO: 4010 - protein, 12 aa, Artificial sequence
  synthetic peptide
KFSEWGNNAFFY

SEQ ID NO: 4011 - protein, 12 aa, Artificial sequence
  synthetic peptide
FSEWGNNAFFYY

SEQ ID NO: 4012 - protein, 12 aa, Artificial sequence
  synthetic peptide
SEWGNNAFFYYF

SEQ ID NO: 4013 - protein, 12 aa, Artificial sequence
  synthetic peptide
EWGNNAFFYYFE

SEQ ID NO: 4014 - protein, 12 aa, Artificial sequence
  synthetic peptide
WGNNAFFYYFEH

SEQ ID NO: 4015 - protein, 12 aa, Artificial sequence
  synthetic peptide
GNNAFFYYFEHR

SEQ ID NO: 4016 - protein, 12 aa, Artificial sequence
  synthetic peptide
NNAFFYYFEHRS

SEQ ID NO: 4017 - protein, 12 aa, Artificial sequence
  synthetic peptide
NAFFYYFEHRSS

SEQ ID NO: 4018 - protein, 12 aa, Artificial sequence
  synthetic peptide
AFFYYFEHRSSK

SEQ ID NO: 4019 - protein, 12 aa, Artificial sequence
  synthetic peptide
FFYYFEHRSSKL

SEQ ID NO: 4020 - protein, 12 aa, Artificial sequence
  synthetic peptide
FYYFEHRSSKLP

SEQ ID NO: 4021 - protein, 12 aa, Artificial sequence
  synthetic peptide
YYFEHRSSKLPW

SEQ ID NO: 4022 - protein, 12 aa, Artificial sequence
  synthetic peptide
YFEHRSSKLPWP

SEQ ID NO: 4023 - protein, 12 aa, Artificial sequence
  synthetic peptide
FEHRSSKLPWPE

SEQ ID NO: 4024 - protein, 12 aa, Artificial sequence
  synthetic peptide
EHRSSKLPWPEW

SEQ ID NO: 4025 - protein, 12 aa, Artificial sequence
  synthetic peptide
HRSSKLPWPEWM

SEQ ID NO: 4026 - protein, 12 aa, Artificial sequence
  synthetic peptide
RSSKLPWPEWMG

SEQ ID NO: 4027 - protein, 12 aa, Artificial sequence
  synthetic peptide
SSKLPWPEWMGV

SEQ ID NO: 4028 - protein, 12 aa, Artificial sequence
  synthetic peptide
SKLPWPEWMGVM

SEQ ID NO: 4029 - protein, 12 aa, Artificial sequence
  synthetic peptide
KLPWPEWMGVMH

SEQ ID NO: 4030 - protein, 12 aa, Artificial sequence
  synthetic peptide
LPWPEWMGVMHG

SEQ ID NO: 4031 - protein, 12 aa, Artificial sequence
  synthetic peptide
PWPEWMGVMHGY

SEQ ID NO: 4032 - protein, 12 aa, Artificial sequence
  synthetic peptide
WPEWMGVMHGYE

SEQ ID NO: 4033 - protein, 12 aa, Artificial sequence
  synthetic peptide
PEWMGVMHGYEI

SEQ ID NO: 4034 - protein, 12 aa, Artificial sequence
  synthetic peptide
EWMGVMHGYEIE

SEQ ID NO: 4035 - protein, 12 aa, Artificial sequence
  synthetic peptide
WMGVMHGYEIEF

SEQ ID NO: 4036 - protein, 12 aa, Artificial sequence
  synthetic peptide
MGVMHGYEIEFV

SEQ ID NO: 4037 - protein, 12 aa, Artificial sequence
  synthetic peptide
GVMHGYEIEFVF

SEQ ID NO: 4038 - protein, 12 aa, Artificial sequence
  synthetic peptide
VMHGYEIEFVFG

SEQ ID NO: 4039 - protein, 12 aa, Artificial sequence
  synthetic peptide
MHGYEIEFVFGL

SEQ ID NO: 4040 - protein, 12 aa, Artificial sequence
  synthetic peptide
HGYEIEFVFGLP

SEQ ID NO: 4041 - protein, 12 aa, Artificial sequence
  synthetic peptide
GYEIEFVFGLPL

SEQ ID NO: 4042 - protein, 12 aa, Artificial sequence
  synthetic peptide
YEIEFVFGLPLE

SEQ ID NO: 4043 - protein, 12 aa, Artificial sequence
  synthetic peptide
EIEFVFGLPLER

SEQ ID NO: 4044 - protein, 12 aa, Artificial sequence
  synthetic peptide
IEFVFGLPLERR

SEQ ID NO: 4045 - protein, 12 aa, Artificial sequence
  synthetic peptide
EFVFGLPLERRD

SEQ ID NO: 4046 - protein, 12 aa, Artificial sequence
  synthetic peptide
FVFGLPLERRDN

SEQ ID NO: 4047 - protein, 12 aa, Artificial sequence
  synthetic peptide
VFGLPLERRDNY

SEQ ID NO: 4048 - protein, 12 aa, Artificial sequence
  synthetic peptide
FGLPLERRDNYT

SEQ ID NO: 4049 - protein, 12 aa, Artificial sequence
  synthetic peptide
GLPLERRDNYTK

SEQ ID NO: 4050 - protein, 12 aa, Artificial sequence
  synthetic peptide
LPLERRDNYTKA

SEQ ID NO: 4051 - protein, 12 aa, Artificial sequence
  synthetic peptide
PLERRDNYTKAE

SEQ ID NO: 4052 - protein, 12 aa, Artificial sequence
  synthetic peptide
LERRDNYTKAEE

SEQ ID NO: 4053 - protein, 12 aa, Artificial sequence
  synthetic peptide
ERRDNYTKAEEI

SEQ ID NO: 4054 - protein, 12 aa, Artificial sequence
  synthetic peptide
RRDNYTKAEEIL

SEQ ID NO: 4055 - protein, 12 aa, Artificial sequence
  synthetic peptide
RDNYTKAEEILS

SEQ ID NO: 4056 - protein, 12 aa, Artificial sequence
  synthetic peptide
DNYTKAEEILSR

SEQ ID NO: 4057 - protein, 12 aa, Artificial sequence
  synthetic peptide
NYTKAEEILSRS

SEQ ID NO: 4058 - protein, 12 aa, Artificial sequence
  synthetic peptide
YTKAEEILSRSI

SEQ ID NO: 4059 - protein, 12 aa, Artificial sequence
  synthetic peptide
TKAEEILSRSIV

SEQ ID NO: 4060 - protein, 12 aa, Artificial sequence
  synthetic peptide
KAEEILSRSIVK

SEQ ID NO: 4061 - protein, 12 aa, Artificial sequence
  synthetic peptide
AEEILSRSIVKR

SEQ ID NO: 4062 - protein, 12 aa, Artificial sequence
  synthetic peptide
EEILSRSIVKRW

SEQ ID NO: 4063 - protein, 12 aa, Artificial sequence
  synthetic peptide
EILSRSIVKRWA

SEQ ID NO: 4064 - protein, 12 aa, Artificial sequence
  synthetic peptide
ILSRSIVKRWAN

SEQ ID NO: 4065 - protein, 12 aa, Artificial sequence
  synthetic peptide
LSRSIVKRWANF

SEQ ID NO: 4066 - protein, 12 aa, Artificial sequence
  synthetic peptide
SRSIVKRWANFA

SEQ ID NO: 4067 - protein, 12 aa, Artificial sequence
  synthetic peptide
RSIVKRWANFAK

SEQ ID NO: 4068 - protein, 12 aa, Artificial sequence
  synthetic peptide
SIVKRWANFAKY

SEQ ID NO: 4069 - protein, 12 aa, Artificial sequence
  synthetic peptide
IVKRWANFAKYG

SEQ ID NO: 4070 - protein, 12 aa, Artificial sequence
  synthetic peptide
VKRWANFAKYGN

SEQ ID NO: 4071 - protein, 12 aa, Artificial sequence
  synthetic peptide
KRWANFAKYGNP

SEQ ID NO: 4072 - protein, 12 aa, Artificial sequence
  synthetic peptide
RWANFAKYGNPN

SEQ ID NO: 4073 - protein, 12 aa, Artificial sequence
  synthetic peptide
WANFAKYGNPNE

SEQ ID NO: 4074 - protein, 12 aa, Artificial sequence
  synthetic peptide
ANFAKYGNPNET

SEQ ID NO: 4075 - protein, 12 aa, Artificial sequence
  synthetic peptide
NFAKYGNPNETQ

SEQ ID NO: 4076 - protein, 12 aa, Artificial sequence
  synthetic peptide
FAKYGNPNETQN

SEQ ID NO: 4077 - protein, 12 aa, Artificial sequence
  synthetic peptide
AKYGNPNETQNN

SEQ ID NO: 4078 - protein, 12 aa, Artificial sequence
  synthetic peptide
KYGNPNETQNNS

SEQ ID NO: 4079 - protein, 12 aa, Artificial sequence
  synthetic peptide
YGNPNETQNNST

SEQ ID NO: 4080 - protein, 12 aa, Artificial sequence
  synthetic peptide
GNPNETQNNSTS

SEQ ID NO: 4081 - protein, 12 aa, Artificial sequence
  synthetic peptide
NPNETQNNSTSW

SEQ ID NO: 4082 - protein, 12 aa, Artificial sequence
  synthetic peptide
PNETQNNSTSWP

SEQ ID NO: 4083 - protein, 12 aa, Artificial sequence
  synthetic peptide
NETQNNSTSWPV

SEQ ID NO: 4084 - protein, 12 aa, Artificial sequence
  synthetic peptide
ETQNNSTSWPVF

SEQ ID NO: 4085 - protein, 12 aa, Artificial sequence
  synthetic peptide
TQNNSTSWPVFK

SEQ ID NO: 4086 - protein, 12 aa, Artificial sequence
  synthetic peptide
QNNSTSWPVFKS

SEQ ID NO: 4087 - protein, 12 aa, Artificial sequence
  synthetic peptide
NNSTSWPVFKST

SEQ ID NO: 4088 - protein, 12 aa, Artificial sequence
  synthetic peptide
NSTSWPVFKSTE

SEQ ID NO: 4089 - protein, 12 aa, Artificial sequence
  synthetic peptide
STSWPVFKSTEQ

SEQ ID NO: 4090 - protein, 12 aa, Artificial sequence
  synthetic peptide
TSWPVFKSTEQK

SEQ ID NO: 4091 - protein, 12 aa, Artificial sequence
  synthetic peptide
SWPVFKSTEQKY

SEQ ID NO: 4092 - protein, 12 aa, Artificial sequence
  synthetic peptide
WPVFKSTEQKYL

SEQ ID NO: 4093 - protein, 12 aa, Artificial sequence
  synthetic peptide
PVFKSTEQKYLT

SEQ ID NO: 4094 - protein, 12 aa, Artificial sequence
  synthetic peptide
VFKSTEQKYLTL

SEQ ID NO: 4095 - protein, 12 aa, Artificial sequence
  synthetic peptide
FKSTEQKYLTLN

SEQ ID NO: 4096 - protein, 12 aa, Artificial sequence
  synthetic peptide
KSTEQKYLTLNT

SEQ ID NO: 4097 - protein, 12 aa, Artificial sequence
  synthetic peptide
STEQKYLTLNTE

SEQ ID NO: 4098 - protein, 12 aa, Artificial sequence
  synthetic peptide
TEQKYLTLNTES

SEQ ID NO: 4099 - protein, 12 aa, Artificial sequence
  synthetic peptide
EQKYLTLNTEST

SEQ ID NO: 4100 - protein, 12 aa, Artificial sequence
  synthetic peptide
QKYLTLNTESTR

SEQ ID NO: 4101 - protein, 12 aa, Artificial sequence
  synthetic peptide
KYLTLNTESTRI

SEQ ID NO: 4102 - protein, 12 aa, Artificial sequence
  synthetic peptide
YLTLNTESTRIM

SEQ ID NO: 4103 - protein, 12 aa, Artificial sequence
  synthetic peptide
LTLNTESTRIMT

SEQ ID NO: 4104 - protein, 12 aa, Artificial sequence
  synthetic peptide
TLNTESTRIMTK

SEQ ID NO: 4105 - protein, 12 aa, Artificial sequence
  synthetic peptide
LNTESTRIMTKL

SEQ ID NO: 4106 - protein, 12 aa, Artificial sequence
  synthetic peptide
NTESTRIMTKLR

SEQ ID NO: 4107 - protein, 12 aa, Artificial sequence
  synthetic peptide
TESTRIMTKLRA

SEQ ID NO: 4108 - protein, 12 aa, Artificial sequence
  synthetic peptide
ESTRIMTKLRAQ

SEQ ID NO: 4109 - protein, 12 aa, Artificial sequence
  synthetic peptide
STRIMTKLRAQQ

SEQ ID NO: 4110 - protein, 12 aa, Artificial sequence
  synthetic peptide
TRIMTKLRAQQC

SEQ ID NO: 4111 - protein, 12 aa, Artificial sequence
  synthetic peptide
RIMTKLRAQQCR

SEQ ID NO: 4112 - protein, 12 aa, Artificial sequence
  synthetic peptide
IMTKLRAQQCRF

SEQ ID NO: 4113 - protein, 12 aa, Artificial sequence
  synthetic peptide
MTKLRAQQCRFW

SEQ ID NO: 4114 - protein, 12 aa, Artificial sequence
  synthetic peptide
TKLRAQQCRFWT

SEQ ID NO: 4115 - protein, 12 aa, Artificial sequence
  synthetic peptide
KLRAQQCRFWTS

SEQ ID NO: 4116 - protein, 12 aa, Artificial sequence
  synthetic peptide
LRAQQCRFWTSF

SEQ ID NO: 4117 - protein, 12 aa, Artificial sequence
  synthetic peptide
RAQQCRFWTSFF

SEQ ID NO: 4118 - protein, 12 aa, Artificial sequence
  synthetic peptide
AQQCRFWTSFFP

SEQ ID NO: 4119 - protein, 12 aa, Artificial sequence
  synthetic peptide
QQCRFWTSFFPK

SEQ ID NO: 4120 - protein, 12 aa, Artificial sequence
  synthetic peptide
QCRFWTSFFPKV

SEQ ID NO: 4121 - protein, 12 aa, Artificial sequence
  synthetic peptide
CRFWTSFFPKVL

SEQ ID NO: 4122 - protein, 12 aa, Artificial sequence
  synthetic peptide
RFWTSFFPKVLE

SEQ ID NO: 4123 - protein, 12 aa, Artificial sequence
  synthetic peptide
FWTSFFPKVLEM

SEQ ID NO: 4124 - protein, 12 aa, Artificial sequence
  synthetic peptide
WTSFFPKVLEMT

SEQ ID NO: 4125 - protein, 12 aa, Artificial sequence
  synthetic peptide
TSFFPKVLEMTG

SEQ ID NO: 4126 - protein, 12 aa, Artificial sequence
  synthetic peptide
SFFPKVLEMTGN

SEQ ID NO: 4127 - protein, 12 aa, Artificial sequence
  synthetic peptide
FFPKVLEMTGNI

SEQ ID NO: 4128 - protein, 12 aa, Artificial sequence
  synthetic peptide
FPKVLEMTGNID

SEQ ID NO: 4129 - protein, 12 aa, Artificial sequence
  synthetic peptide
PKVLEMTGNIDE

SEQ ID NO: 4130 - protein, 12 aa, Artificial sequence
  synthetic peptide
KVLEMTGNIDEA

SEQ ID NO: 4131 - protein, 12 aa, Artificial sequence
  synthetic peptide
VLEMTGNIDEAE

SEQ ID NO: 4132 - protein, 12 aa, Artificial sequence
  synthetic peptide
LEMTGNIDEAEW

SEQ ID NO: 4133 - protein, 12 aa, Artificial sequence
  synthetic peptide
EMTGNIDEAEWE

SEQ ID NO: 4134 - protein, 12 aa, Artificial sequence
  synthetic peptide
MTGNIDEAEWEW

SEQ ID NO: 4135 - protein, 12 aa, Artificial sequence
  synthetic peptide
TGNIDEAEWEWK

SEQ ID NO: 4136 - protein, 12 aa, Artificial sequence
  synthetic peptide
GNIDEAEWEWKA

SEQ ID NO: 4137 - protein, 12 aa, Artificial sequence
  synthetic peptide
NIDEAEWEWKAG

SEQ ID NO: 4138 - protein, 12 aa, Artificial sequence
  synthetic peptide
IDEAEWEWKAGF

SEQ ID NO: 4139 - protein, 12 aa, Artificial sequence
  synthetic peptide
DEAEWEWKAGFH

SEQ ID NO: 4140 - protein, 12 aa, Artificial sequence
  synthetic peptide
EAEWEWKAGFHR

SEQ ID NO: 4141 - protein, 12 aa, Artificial sequence
  synthetic peptide
AEWEWKAGFHRW

SEQ ID NO: 4142 - protein, 12 aa, Artificial sequence
  synthetic peptide
EWEWKAGFHRWN

SEQ ID NO: 4143 - protein, 12 aa, Artificial sequence
  synthetic peptide
WEWKAGFHRWNN

SEQ ID NO: 4144 - protein, 12 aa, Artificial sequence
  synthetic peptide
EWKAGFHRWNNY

SEQ ID NO: 4145 - protein, 12 aa, Artificial sequence
  synthetic peptide
WKAGFHRWNNYM

SEQ ID NO: 4146 - protein, 12 aa, Artificial sequence
  synthetic peptide
KAGFHRWNNYMM

SEQ ID NO: 4147 - protein, 12 aa, Artificial sequence
  synthetic peptide
AGFHRWNNYMMD

SEQ ID NO: 4148 - protein, 12 aa, Artificial sequence
  synthetic peptide
GFHRWNNYMMDW

SEQ ID NO: 4149 - protein, 12 aa, Artificial sequence
  synthetic peptide
FHRWNNYMMDWK

SEQ ID NO: 4150 - protein, 12 aa, Artificial sequence
  synthetic peptide
HRWNNYMMDWKN

SEQ ID NO: 4151 - protein, 12 aa, Artificial sequence
  synthetic peptide
RWNNYMMDWKNQ

SEQ ID NO: 4152 - protein, 12 aa, Artificial sequence
  synthetic peptide
WNNYMMDWKNQF

SEQ ID NO: 4153 - protein, 12 aa, Artificial sequence
  synthetic peptide
NNYMMDWKNQFN

SEQ ID NO: 4154 - protein, 12 aa, Artificial sequence
  synthetic peptide
NYMMDWKNQFND

SEQ ID NO: 4155 - protein, 12 aa, Artificial sequence
  synthetic peptide
YMMDWKNQFNDY

SEQ ID NO: 4156 - protein, 12 aa, Artificial sequence
  synthetic peptide
MMDWKNQFNDYT

SEQ ID NO: 4157 - protein, 12 aa, Artificial sequence
  synthetic peptide
MDWKNQFNDYTS

SEQ ID NO: 4158 - protein, 12 aa, Artificial sequence
  synthetic peptide
DWKNQFNDYTSK

SEQ ID NO: 4159 - protein, 12 aa, Artificial sequence
  synthetic peptide
WKNQFNDYTSKK

SEQ ID NO: 4160 - protein, 12 aa, Artificial sequence
  synthetic peptide
KNQFNDYTSKKE

SEQ ID NO: 4161 - protein, 12 aa, Artificial sequence
  synthetic peptide
NQFNDYTSKKES

SEQ ID NO: 4162 - protein, 12 aa, Artificial sequence
  synthetic peptide
QFNDYTSKKESC

SEQ ID NO: 4163 - protein, 12 aa, Artificial sequence
  synthetic peptide
FNDYTSKKESCV

SEQ ID NO: 4164 - protein, 12 aa, Artificial sequence
  synthetic peptide
NDYTSKKESCVG

SEQ ID NO: 4165 - protein, 12 aa, Artificial sequence
  synthetic peptide
DYTSKKESCVGL

SEQ ID NO: 4166 - protein, 13 aa, Artificial sequence
  synthetic peptide
MHSKVTIICIRFL

SEQ ID NO: 4167 - protein, 13 aa, Artificial sequence
  synthetic peptide
HSKVTIICIRFLF

SEQ ID NO: 4168 - protein, 13 aa, Artificial sequence
  synthetic peptide
SKVTIICIRFLFW

SEQ ID NO: 4169 - protein, 13 aa, Artificial sequence
  synthetic peptide
KVTIICIRFLFWF

SEQ ID NO: 4170 - protein, 13 aa, Artificial sequence
  synthetic peptide
VTIICIRFLFWFL

SEQ ID NO: 4171 - protein, 13 aa, Artificial sequence
  synthetic peptide
TIICIRFLFWFLL

SEQ ID NO: 4172 - protein, 13 aa, Artificial sequence
  synthetic peptide
IICIRFLFWFLLL

SEQ ID NO: 4173 - protein, 13 aa, Artificial sequence
  synthetic peptide
ICIRFLFWFLLLC

SEQ ID NO: 4174 - protein, 13 aa, Artificial sequence
  synthetic peptide
CIRFLFWFLLLCM

SEQ ID NO: 4175 - protein, 13 aa, Artificial sequence
  synthetic peptide
IRFLFWFLLLCML

SEQ ID NO: 4176 - protein, 13 aa, Artificial sequence
  synthetic peptide
RFLFWFLLLCMLI

SEQ ID NO: 4177 - protein, 13 aa, Artificial sequence
  synthetic peptide
FLFWFLLLCMLIG

SEQ ID NO: 4178 - protein, 13 aa, Artificial sequence
  synthetic peptide
LFWFLLLCMLIGK

SEQ ID NO: 4179 - protein, 13 aa, Artificial sequence
  synthetic peptide
FWFLLLCMLIGKS

SEQ ID NO: 4180 - protein, 13 aa, Artificial sequence
  synthetic peptide
WFLLLCMLIGKSH

SEQ ID NO: 4181 - protein, 13 aa, Artificial sequence
  synthetic peptide
FLLLCMLIGKSHT

SEQ ID NO: 4182 - protein, 13 aa, Artificial sequence
  synthetic peptide
LLLCMLIGKSHTE

SEQ ID NO: 4183 - protein, 13 aa, Artificial sequence
  synthetic peptide
LLCMLIGKSHTED

SEQ ID NO: 4184 - protein, 13 aa, Artificial sequence
  synthetic peptide
LCMLIGKSHTEDD

SEQ ID NO: 4185 - protein, 13 aa, Artificial sequence
  synthetic peptide
CMLIGKSHTEDDI

SEQ ID NO: 4186 - protein, 13 aa, Artificial sequence
  synthetic peptide
MLIGKSHTEDDII

SEQ ID NO: 4187 - protein, 13 aa, Artificial sequence
  synthetic peptide
LIGKSHTEDDIII

SEQ ID NO: 4188 - protein, 13 aa, Artificial sequence
  synthetic peptide
IGKSHTEDDIIIA

SEQ ID NO: 4189 - protein, 13 aa, Artificial sequence
  synthetic peptide
GKSHTEDDIIIAT

SEQ ID NO: 4190 - protein, 13 aa, Artificial sequence
  synthetic peptide
KSHTEDDIIIATK

SEQ ID NO: 4191 - protein, 13 aa, Artificial sequence
  synthetic peptide
SHTEDDIIIATKN

SEQ ID NO: 4192 - protein, 13 aa, Artificial sequence
  synthetic peptide
HTEDDIIIATKNG

SEQ ID NO: 4193 - protein, 13 aa, Artificial sequence
  synthetic peptide
TEDDIIIATKNGK

SEQ ID NO: 4194 - protein, 13 aa, Artificial sequence
  synthetic peptide
EDDIIIATKNGKV

SEQ ID NO: 4195 - protein, 13 aa, Artificial sequence
  synthetic peptide
DDIIIATKNGKVR

SEQ ID NO: 4196 - protein, 13 aa, Artificial sequence
  synthetic peptide
DIIIATKNGKVRG

SEQ ID NO: 4197 - protein, 13 aa, Artificial sequence
  synthetic peptide
IIIATKNGKVRGM

SEQ ID NO: 4198 - protein, 13 aa, Artificial sequence
  synthetic peptide
IIATKNGKVRGMN

SEQ ID NO: 4199 - protein, 13 aa, Artificial sequence
  synthetic peptide
IATKNGKVRGMNL

SEQ ID NO: 4200 - protein, 13 aa, Artificial sequence
  synthetic peptide
ATKNGKVRGMNLT

SEQ ID NO: 4201 - protein, 13 aa, Artificial sequence
  synthetic peptide
TKNGKVRGMNLTV

SEQ ID NO: 4202 - protein, 13 aa, Artificial sequence
  synthetic peptide
KNGKVRGMNLTVF

SEQ ID NO: 4203 - protein, 13 aa, Artificial sequence
  synthetic peptide
NGKVRGMNLTVFG

SEQ ID NO: 4204 - protein, 13 aa, Artificial sequence
  synthetic peptide
GKVRGMNLTVFGG

SEQ ID NO: 4205 - protein, 13 aa, Artificial sequence
  synthetic peptide
KVRGMNLTVFGGT

SEQ ID NO: 4206 - protein, 13 aa, Artificial sequence
  synthetic peptide
VRGMNLTVFGGTV

SEQ ID NO: 4207 - protein, 13 aa, Artificial sequence
  synthetic peptide
RGMNLTVFGGTVT

SEQ ID NO: 4208 - protein, 13 aa, Artificial sequence
  synthetic peptide
GMNLTVFGGTVTA

SEQ ID NO: 4209 - protein, 13 aa, Artificial sequence
  synthetic peptide
MNLTVFGGTVTAF

SEQ ID NO: 4210 - protein, 13 aa, Artificial sequence
  synthetic peptide
NLTVFGGTVTAFL

SEQ ID NO: 4211 - protein, 13 aa, Artificial sequence
  synthetic peptide
LTVFGGTVTAFLG

SEQ ID NO: 4212 - protein, 13 aa, Artificial sequence
  synthetic peptide
TVFGGTVTAFLGI

SEQ ID NO: 4213 - protein, 13 aa, Artificial sequence
  synthetic peptide
VFGGTVTAFLGIP

SEQ ID NO: 4214 - protein, 13 aa, Artificial sequence
  synthetic peptide
FGGTVTAFLGIPY

SEQ ID NO: 4215 - protein, 13 aa, Artificial sequence
  synthetic peptide
GGTVTAFLGIPYA

SEQ ID NO: 4216 - protein, 13 aa, Artificial sequence
  synthetic peptide
GTVTAFLGIPYAQ

SEQ ID NO: 4217 - protein, 13 aa, Artificial sequence
  synthetic peptide
TVTAFLGIPYAQP

SEQ ID NO: 4218 - protein, 13 aa, Artificial sequence
  synthetic peptide
VTAFLGIPYAQPP

SEQ ID NO: 4219 - protein, 13 aa, Artificial sequence
  synthetic peptide
TAFLGIPYAQPPL

SEQ ID NO: 4220 - protein, 13 aa, Artificial sequence
  synthetic peptide
AFLGIPYAQPPLG

SEQ ID NO: 4221 - protein, 13 aa, Artificial sequence
  synthetic peptide
FLGIPYAQPPLGR

SEQ ID NO: 4222 - protein, 13 aa, Artificial sequence
  synthetic peptide
LGIPYAQPPLGRL

SEQ ID NO: 4223 - protein, 13 aa, Artificial sequence
  synthetic peptide
GIPYAQPPLGRLR

SEQ ID NO: 4224 - protein, 13 aa, Artificial sequence
  synthetic peptide
IPYAQPPLGRLRF

SEQ ID NO: 4225 - protein, 13 aa, Artificial sequence
  synthetic peptide
PYAQPPLGRLRFK

SEQ ID NO: 4226 - protein, 13 aa, Artificial sequence
  synthetic peptide
YAQPPLGRLRFKK

SEQ ID NO: 4227 - protein, 13 aa, Artificial sequence
  synthetic peptide
AQPPLGRLRFKKP

SEQ ID NO: 4228 - protein, 13 aa, Artificial sequence
  synthetic peptide
QPPLGRLRFKKPQ

SEQ ID NO: 4229 - protein, 13 aa, Artificial sequence
  synthetic peptide
PPLGRLRFKKPQS

SEQ ID NO: 4230 - protein, 13 aa, Artificial sequence
  synthetic peptide
PLGRLRFKKPQSL

SEQ ID NO: 4231 - protein, 13 aa, Artificial sequence
  synthetic peptide
LGRLRFKKPQSLT

SEQ ID NO: 4232 - protein, 13 aa, Artificial sequence
  synthetic peptide
GRLRFKKPQSLTK

SEQ ID NO: 4233 - protein, 13 aa, Artificial sequence
  synthetic peptide
RLRFKKPQSLTKW

SEQ ID NO: 4234 - protein, 13 aa, Artificial sequence
  synthetic peptide
LRFKKPQSLTKWS

SEQ ID NO: 4235 - protein, 13 aa, Artificial sequence
  synthetic peptide
RFKKPQSLTKWSD

SEQ ID NO: 4236 - protein, 13 aa, Artificial sequence
  synthetic peptide
FKKPQSLTKWSDI

SEQ ID NO: 4237 - protein, 13 aa, Artificial sequence
  synthetic peptide
KKPQSLTKWSDIW

SEQ ID NO: 4238 - protein, 13 aa, Artificial sequence
  synthetic peptide
KPQSLTKWSDIWN

SEQ ID NO: 4239 - protein, 13 aa, Artificial sequence
  synthetic peptide
PQSLTKWSDIWNA

SEQ ID NO: 4240 - protein, 13 aa, Artificial sequence
  synthetic peptide
QSLTKWSDIWNAT

SEQ ID NO: 4241 - protein, 13 aa, Artificial sequence
  synthetic peptide
SLTKWSDIWNATK

SEQ ID NO: 4242 - protein, 13 aa, Artificial sequence
  synthetic peptide
LTKWSDIWNATKY

SEQ ID NO: 4243 - protein, 13 aa, Artificial sequence
  synthetic peptide
TKWSDIWNATKYA

SEQ ID NO: 4244 - protein, 13 aa, Artificial sequence
  synthetic peptide
KWSDIWNATKYAN

SEQ ID NO: 4245 - protein, 13 aa, Artificial sequence
  synthetic peptide
WSDIWNATKYANS

SEQ ID NO: 4246 - protein, 13 aa, Artificial sequence
  synthetic peptide
SDIWNATKYANSC

SEQ ID NO: 4247 - protein, 13 aa, Artificial sequence
  synthetic peptide
DIWNATKYANSCC

SEQ ID NO: 4248 - protein, 13 aa, Artificial sequence
  synthetic peptide
IWNATKYANSCCQ

SEQ ID NO: 4249 - protein, 13 aa, Artificial sequence
  synthetic peptide
WNATKYANSCCQN

SEQ ID NO: 4250 - protein, 13 aa, Artificial sequence
  synthetic peptide
NATKYANSCCQNI

SEQ ID NO: 4251 - protein, 13 aa, Artificial sequence
  synthetic peptide
ATKYANSCCQNID

SEQ ID NO: 4252 - protein, 13 aa, Artificial sequence
  synthetic peptide
TKYANSCCQNIDQ

SEQ ID NO: 4253 - protein, 13 aa, Artificial sequence
  synthetic peptide
KYANSCCQNIDQS

SEQ ID NO: 4254 - protein, 13 aa, Artificial sequence
  synthetic peptide
YANSCCQNIDQSF

SEQ ID NO: 4255 - protein, 13 aa, Artificial sequence
  synthetic peptide
ANSCCQNIDQSFP

SEQ ID NO: 4256 - protein, 13 aa, Artificial sequence
  synthetic peptide
NSCCQNIDQSFPG

SEQ ID NO: 4257 - protein, 13 aa, Artificial sequence
  synthetic peptide
SCCQNIDQSFPGF

SEQ ID NO: 4258 - protein, 13 aa, Artificial sequence
  synthetic peptide
CCQNIDQSFPGFH

SEQ ID NO: 4259 - protein, 13 aa, Artificial sequence
  synthetic peptide
CQNIDQSFPGFHG

SEQ ID NO: 4260 - protein, 13 aa, Artificial sequence
  synthetic peptide
QNIDQSFPGFHGS

SEQ ID NO: 4261 - protein, 13 aa, Artificial sequence
  synthetic peptide
NIDQSFPGFHGSE

SEQ ID NO: 4262 - protein, 13 aa, Artificial sequence
  synthetic peptide
IDQSFPGFHGSEM

SEQ ID NO: 4263 - protein, 13 aa, Artificial sequence
  synthetic peptide
DQSFPGFHGSEMW

SEQ ID NO: 4264 - protein, 13 aa, Artificial sequence
  synthetic peptide
QSFPGFHGSEMWN

SEQ ID NO: 4265 - protein, 13 aa, Artificial sequence
  synthetic peptide
SFPGFHGSEMWNP

SEQ ID NO: 4266 - protein, 13 aa, Artificial sequence
  synthetic peptide
FPGFHGSEMWNPN

SEQ ID NO: 4267 - protein, 13 aa, Artificial sequence
  synthetic peptide
PGFHGSEMWNPNT

SEQ ID NO: 4268 - protein, 13 aa, Artificial sequence
  synthetic peptide
GFHGSEMWNPNTD

SEQ ID NO: 4269 - protein, 13 aa, Artificial sequence
  synthetic peptide
FHGSEMWNPNTDL

SEQ ID NO: 4270 - protein, 13 aa, Artificial sequence
  synthetic peptide
HGSEMWNPNTDLS

SEQ ID NO: 4271 - protein, 13 aa, Artificial sequence
  synthetic peptide
GSEMWNPNTDLSE

SEQ ID NO: 4272 - protein, 13 aa, Artificial sequence
  synthetic peptide
SEMWNPNTDLSED

SEQ ID NO: 4273 - protein, 13 aa, Artificial sequence
  synthetic peptide
EMWNPNTDLSEDC

SEQ ID NO: 4274 - protein, 13 aa, Artificial sequence
  synthetic peptide
MWNPNTDLSEDCL

SEQ ID NO: 4275 - protein, 13 aa, Artificial sequence
  synthetic peptide
WNPNTDLSEDCLY

SEQ ID NO: 4276 - protein, 13 aa, Artificial sequence
  synthetic peptide
NPNTDLSEDCLYL

SEQ ID NO: 4277 - protein, 13 aa, Artificial sequence
  synthetic peptide
PNTDLSEDCLYLN

SEQ ID NO: 4278 - protein, 13 aa, Artificial sequence
  synthetic peptide
NTDLSEDCLYLNV

SEQ ID NO: 4279 - protein, 13 aa, Artificial sequence
  synthetic peptide
TDLSEDCLYLNVW

SEQ ID NO: 4280 - protein, 13 aa, Artificial sequence
  synthetic peptide
DLSEDCLYLNVWI

SEQ ID NO: 4281 - protein, 13 aa, Artificial sequence
  synthetic peptide
LSEDCLYLNVWIP

SEQ ID NO: 4282 - protein, 13 aa, Artificial sequence
  synthetic peptide
SEDCLYLNVWIPA

SEQ ID NO: 4283 - protein, 13 aa, Artificial sequence
  synthetic peptide
EDCLYLNVWIPAP

SEQ ID NO: 4284 - protein, 13 aa, Artificial sequence
  synthetic peptide
DCLYLNVWIPAPK

SEQ ID NO: 4285 - protein, 13 aa, Artificial sequence
  synthetic peptide
CLYLNVWIPAPKP

SEQ ID NO: 4286 - protein, 13 aa, Artificial sequence
  synthetic peptide
LYLNVWIPAPKPK

SEQ ID NO: 4287 - protein, 13 aa, Artificial sequence
  synthetic peptide
YLNVWIPAPKPKN

SEQ ID NO: 4288 - protein, 13 aa, Artificial sequence
  synthetic peptide
LNVWIPAPKPKNA

SEQ ID NO: 4289 - protein, 13 aa, Artificial sequence
  synthetic peptide
NVWIPAPKPKNAT

SEQ ID NO: 4290 - protein, 13 aa, Artificial sequence
  synthetic peptide
VWIPAPKPKNATV

SEQ ID NO: 4291 - protein, 13 aa, Artificial sequence
  synthetic peptide
WIPAPKPKNATVL

SEQ ID NO: 4292 - protein, 13 aa, Artificial sequence
  synthetic peptide
IPAPKPKNATVLI

SEQ ID NO: 4293 - protein, 13 aa, Artificial sequence
  synthetic peptide
PAPKPKNATVLIW

SEQ ID NO: 4294 - protein, 13 aa, Artificial sequence
  synthetic peptide
APKPKNATVLIWI

SEQ ID NO: 4295 - protein, 13 aa, Artificial sequence
  synthetic peptide
PKPKNATVLIWIY

SEQ ID NO: 4296 - protein, 13 aa, Artificial sequence
  synthetic peptide
KPKNATVLIWIYG

SEQ ID NO: 4297 - protein, 13 aa, Artificial sequence
  synthetic peptide
PKNATVLIWIYGG

SEQ ID NO: 4298 - protein, 13 aa, Artificial sequence
  synthetic peptide
KNATVLIWIYGGG

SEQ ID NO: 4299 - protein, 13 aa, Artificial sequence
  synthetic peptide
NATVLIWIYGGGF

SEQ ID NO: 4300 - protein, 13 aa, Artificial sequence
  synthetic peptide
ATVLIWIYGGGFQ

SEQ ID NO: 4301 - protein, 13 aa, Artificial sequence
  synthetic peptide
TVLIWIYGGGFQT

SEQ ID NO: 4302 - protein, 13 aa, Artificial sequence
  synthetic peptide
VLIWIYGGGFQTG

SEQ ID NO: 4303 - protein, 13 aa, Artificial sequence
  synthetic peptide
LIWIYGGGFQTGT

SEQ ID NO: 4304 - protein, 13 aa, Artificial sequence
  synthetic peptide
IWIYGGGFQTGTS

SEQ ID NO: 4305 - protein, 13 aa, Artificial sequence
  synthetic peptide
WIYGGGFQTGTSS

SEQ ID NO: 4306 - protein, 13 aa, Artificial sequence
  synthetic peptide
IYGGGFQTGTSSL

SEQ ID NO: 4307 - protein, 13 aa, Artificial sequence
  synthetic peptide
YGGGFQTGTSSLH

SEQ ID NO: 4308 - protein, 13 aa, Artificial sequence
  synthetic peptide
GGGFQTGTSSLHV

SEQ ID NO: 4309 - protein, 13 aa, Artificial sequence
  synthetic peptide
GGFQTGTSSLHVY

SEQ ID NO: 4310 - protein, 13 aa, Artificial sequence
  synthetic peptide
GFQTGTSSLHVYD

SEQ ID NO: 4311 - protein, 13 aa, Artificial sequence
  synthetic peptide
FQTGTSSLHVYDG

SEQ ID NO: 4312 - protein, 13 aa, Artificial sequence
  synthetic peptide
QTGTSSLHVYDGK

SEQ ID NO: 4313 - protein, 13 aa, Artificial sequence
  synthetic peptide
TGTSSLHVYDGKF

SEQ ID NO: 4314 - protein, 13 aa, Artificial sequence
  synthetic peptide
GTSSLHVYDGKFL

SEQ ID NO: 4315 - protein, 13 aa, Artificial sequence
  synthetic peptide
TSSLHVYDGKFLA

SEQ ID NO: 4316 - protein, 13 aa, Artificial sequence
  synthetic peptide
SSLHVYDGKFLAR

SEQ ID NO: 4317 - protein, 13 aa, Artificial sequence
  synthetic peptide
SLHVYDGKFLARV

SEQ ID NO: 4318 - protein, 13 aa, Artificial sequence
  synthetic peptide
LHVYDGKFLARVE

SEQ ID NO: 4319 - protein, 13 aa, Artificial sequence
  synthetic peptide
HVYDGKFLARVER

SEQ ID NO: 4320 - protein, 13 aa, Artificial sequence
  synthetic peptide
VYDGKFLARVERV

SEQ ID NO: 4321 - protein, 13 aa, Artificial sequence
  synthetic peptide
YDGKFLARVERVI

SEQ ID NO: 4322 - protein, 13 aa, Artificial sequence
  synthetic peptide
DGKFLARVERVIV

SEQ ID NO: 4323 - protein, 13 aa, Artificial sequence
  synthetic peptide
GKFLARVERVIVV

SEQ ID NO: 4324 - protein, 13 aa, Artificial sequence
  synthetic peptide
KFLARVERVIVVS

SEQ ID NO: 4325 - protein, 13 aa, Artificial sequence
  synthetic peptide
FLARVERVIVVSM

SEQ ID NO: 4326 - protein, 13 aa, Artificial sequence
  synthetic peptide
LARVERVIVVSMN

SEQ ID NO: 4327 - protein, 13 aa, Artificial sequence
  synthetic peptide
ARVERVIVVSMNY

SEQ ID NO: 4328 - protein, 13 aa, Artificial sequence
  synthetic peptide
RVERVIVVSMNYR

SEQ ID NO: 4329 - protein, 13 aa, Artificial sequence
  synthetic peptide
VERVIVVSMNYRV

SEQ ID NO: 4330 - protein, 13 aa, Artificial sequence
  synthetic peptide
ERVIVVSMNYRVG

SEQ ID NO: 4331 - protein, 13 aa, Artificial sequence
  synthetic peptide
RVIVVSMNYRVGA

SEQ ID NO: 4332 - protein, 13 aa, Artificial sequence
  synthetic peptide
VIVVSMNYRVGAL

SEQ ID NO: 4333 - protein, 13 aa, Artificial sequence
  synthetic peptide
IVVSMNYRVGALG

SEQ ID NO: 4334 - protein, 13 aa, Artificial sequence
  synthetic peptide
VVSMNYRVGALGF

SEQ ID NO: 4335 - protein, 13 aa, Artificial sequence
  synthetic peptide
VSMNYRVGALGFL

SEQ ID NO: 4336 - protein, 13 aa, Artificial sequence
  synthetic peptide
SMNYRVGALGFLA

SEQ ID NO: 4337 - protein, 13 aa, Artificial sequence
  synthetic peptide
MNYRVGALGFLAL

SEQ ID NO: 4338 - protein, 13 aa, Artificial sequence
  synthetic peptide
NYRVGALGFLALP

SEQ ID NO: 4339 - protein, 13 aa, Artificial sequence
  synthetic peptide
YRVGALGFLALPG

SEQ ID NO: 4340 - protein, 13 aa, Artificial sequence
  synthetic peptide
RVGALGFLALPGN

SEQ ID NO: 4341 - protein, 13 aa, Artificial sequence
  synthetic peptide
VGALGFLALPGNP

SEQ ID NO: 4342 - protein, 13 aa, Artificial sequence
  synthetic peptide
GALGFLALPGNPE

SEQ ID NO: 4343 - protein, 13 aa, Artificial sequence
  synthetic peptide
ALGFLALPGNPEA

SEQ ID NO: 4344 - protein, 13 aa, Artificial sequence
  synthetic peptide
LGFLALPGNPEAP

SEQ ID NO: 4345 - protein, 13 aa, Artificial sequence
  synthetic peptide
GFLALPGNPEAPG

SEQ ID NO: 4346 - protein, 13 aa, Artificial sequence
  synthetic peptide
FLALPGNPEAPGN

SEQ ID NO: 4347 - protein, 13 aa, Artificial sequence
  synthetic peptide
LALPGNPEAPGNM

SEQ ID NO: 4348 - protein, 13 aa, Artificial sequence
  synthetic peptide
ALPGNPEAPGNMG

SEQ ID NO: 4349 - protein, 13 aa, Artificial sequence
  synthetic peptide
LPGNPEAPGNMGL

SEQ ID NO: 4350 - protein, 13 aa, Artificial sequence
  synthetic peptide
PGNPEAPGNMGLF

SEQ ID NO: 4351 - protein, 13 aa, Artificial sequence
  synthetic peptide
GNPEAPGNMGLFD

SEQ ID NO: 4352 - protein, 13 aa, Artificial sequence
  synthetic peptide
NPEAPGNMGLFDQ

SEQ ID NO: 4353 - protein, 13 aa, Artificial sequence
  synthetic peptide
PEAPGNMGLFDQQ

SEQ ID NO: 4354 - protein, 13 aa, Artificial sequence
  synthetic peptide
EAPGNMGLFDQQL

SEQ ID NO: 4355 - protein, 13 aa, Artificial sequence
  synthetic peptide
APGNMGLFDQQLA

SEQ ID NO: 4356 - protein, 13 aa, Artificial sequence
  synthetic peptide
PGNMGLFDQQLAL

SEQ ID NO: 4357 - protein, 13 aa, Artificial sequence
  synthetic peptide
GNMGLFDQQLALQ

SEQ ID NO: 4358 - protein, 13 aa, Artificial sequence
  synthetic peptide
NMGLFDQQLALQW

SEQ ID NO: 4359 - protein, 13 aa, Artificial sequence
  synthetic peptide
MGLFDQQLALQWV

SEQ ID NO: 4360 - protein, 13 aa, Artificial sequence
  synthetic peptide
GLFDQQLALQWVQ

SEQ ID NO: 4361 - protein, 13 aa, Artificial sequence
  synthetic peptide
LFDQQLALQWVQK

SEQ ID NO: 4362 - protein, 13 aa, Artificial sequence
  synthetic peptide
FDQQLALQWVQKN

SEQ ID NO: 4363 - protein, 13 aa, Artificial sequence
  synthetic peptide
DQQLALQWVQKNI

SEQ ID NO: 4364 - protein, 13 aa, Artificial sequence
  synthetic peptide
QQLALQWVQKNIA

SEQ ID NO: 4365 - protein, 13 aa, Artificial sequence
  synthetic peptide
QLALQWVQKNIAA

SEQ ID NO: 4366 - protein, 13 aa, Artificial sequence
  synthetic peptide
LALQWVQKNIAAF

SEQ ID NO: 4367 - protein, 13 aa, Artificial sequence
  synthetic peptide
ALQWVQKNIAAFG

SEQ ID NO: 4368 - protein, 13 aa, Artificial sequence
  synthetic peptide
LQWVQKNIAAFGG

SEQ ID NO: 4369 - protein, 13 aa, Artificial sequence
  synthetic peptide
QWVQKNIAAFGGN

SEQ ID NO: 4370 - protein, 13 aa, Artificial sequence
  synthetic peptide
WVQKNIAAFGGNP

SEQ ID NO: 4371 - protein, 13 aa, Artificial sequence
  synthetic peptide
VQKNIAAFGGNPK

SEQ ID NO: 4372 - protein, 13 aa, Artificial sequence
  synthetic peptide
QKNIAAFGGNPKS

SEQ ID NO: 4373 - protein, 13 aa, Artificial sequence
  synthetic peptide
KNIAAFGGNPKSV

SEQ ID NO: 4374 - protein, 13 aa, Artificial sequence
  synthetic peptide
NIAAFGGNPKSVT

SEQ ID NO: 4375 - protein, 13 aa, Artificial sequence
  synthetic peptide
IAAFGGNPKSVTL

SEQ ID NO: 4376 - protein, 13 aa, Artificial sequence
  synthetic peptide
AAFGGNPKSVTLF

SEQ ID NO: 4377 - protein, 13 aa, Artificial sequence
  synthetic peptide
AFGGNPKSVTLFG

SEQ ID NO: 4378 - protein, 13 aa, Artificial sequence
  synthetic peptide
FGGNPKSVTLFGE

SEQ ID NO: 4379 - protein, 13 aa, Artificial sequence
  synthetic peptide
GGNPKSVTLFGES

SEQ ID NO: 4380 - protein, 13 aa, Artificial sequence
  synthetic peptide
GNPKSVTLFGESA

SEQ ID NO: 4381 - protein, 13 aa, Artificial sequence
  synthetic peptide
NPKSVTLFGESAG

SEQ ID NO: 4382 - protein, 13 aa, Artificial sequence
  synthetic peptide
PKSVTLFGESAGA

SEQ ID NO: 4383 - protein, 13 aa, Artificial sequence
  synthetic peptide
KSVTLFGESAGAA

SEQ ID NO: 4384 - protein, 13 aa, Artificial sequence
  synthetic peptide
SVTLFGESAGAAS

SEQ ID NO: 4385 - protein, 13 aa, Artificial sequence
  synthetic peptide
VTLFGESAGAASV

SEQ ID NO: 4386 - protein, 13 aa, Artificial sequence
  synthetic peptide
TLFGESAGAASVS

SEQ ID NO: 4387 - protein, 13 aa, Artificial sequence
  synthetic peptide
LFGESAGAASVSL

SEQ ID NO: 4388 - protein, 13 aa, Artificial sequence
  synthetic peptide
FGESAGAASVSLH

SEQ ID NO: 4389 - protein, 13 aa, Artificial sequence
  synthetic peptide
GESAGAASVSLHL

SEQ ID NO: 4390 - protein, 13 aa, Artificial sequence
  synthetic peptide
ESAGAASVSLHLL

SEQ ID NO: 4391 - protein, 13 aa, Artificial sequence
  synthetic peptide
SAGAASVSLHLLS

SEQ ID NO: 4392 - protein, 13 aa, Artificial sequence
  synthetic peptide
AGAASVSLHLLSP

SEQ ID NO: 4393 - protein, 13 aa, Artificial sequence
  synthetic peptide
GAASVSLHLLSPG

SEQ ID NO: 4394 - protein, 13 aa, Artificial sequence
  synthetic peptide
AASVSLHLLSPGS

SEQ ID NO: 4395 - protein, 13 aa, Artificial sequence
  synthetic peptide
ASVSLHLLSPGSH

SEQ ID NO: 4396 - protein, 13 aa, Artificial sequence
  synthetic peptide
SVSLHLLSPGSHS

SEQ ID NO: 4397 - protein, 13 aa, Artificial sequence
  synthetic peptide
VSLHLLSPGSHSL

SEQ ID NO: 4398 - protein, 13 aa, Artificial sequence
  synthetic peptide
SLHLLSPGSHSLF

SEQ ID NO: 4399 - protein, 13 aa, Artificial sequence
  synthetic peptide
LHLLSPGSHSLFT

SEQ ID NO: 4400 - protein, 13 aa, Artificial sequence
  synthetic peptide
HLLSPGSHSLFTR

SEQ ID NO: 4401 - protein, 13 aa, Artificial sequence
  synthetic peptide
LLSPGSHSLFTRA

SEQ ID NO: 4402 - protein, 13 aa, Artificial sequence
  synthetic peptide
LSPGSHSLFTRAI

SEQ ID NO: 4403 - protein, 13 aa, Artificial sequence
  synthetic peptide
SPGSHSLFTRAIL

SEQ ID NO: 4404 - protein, 13 aa, Artificial sequence
  synthetic peptide
PGSHSLFTRAILQ

SEQ ID NO: 4405 - protein, 13 aa, Artificial sequence
  synthetic peptide
GSHSLFTRAILQS

SEQ ID NO: 4406 - protein, 13 aa, Artificial sequence
  synthetic peptide
SHSLFTRAILQSG

SEQ ID NO: 4407 - protein, 13 aa, Artificial sequence
  synthetic peptide
HSLFTRAILQSGS

SEQ ID NO: 4408 - protein, 13 aa, Artificial sequence
  synthetic peptide
SLFTRAILQSGSF

SEQ ID NO: 4409 - protein, 13 aa, Artificial sequence
  synthetic peptide
LFTRAILQSGSFN

SEQ ID NO: 4410 - protein, 13 aa, Artificial sequence
  synthetic peptide
FTRAILQSGSFNA

SEQ ID NO: 4411 - protein, 13 aa, Artificial sequence
  synthetic peptide
TRAILQSGSFNAP

SEQ ID NO: 4412 - protein, 13 aa, Artificial sequence
  synthetic peptide
RAILQSGSFNAPW

SEQ ID NO: 4413 - protein, 13 aa, Artificial sequence
  synthetic peptide
AILQSGSFNAPWA

SEQ ID NO: 4414 - protein, 13 aa, Artificial sequence
  synthetic peptide
ILQSGSFNAPWAV

SEQ ID NO: 4415 - protein, 13 aa, Artificial sequence
  synthetic peptide
LQSGSFNAPWAVT

SEQ ID NO: 4416 - protein, 13 aa, Artificial sequence
  synthetic peptide
QSGSFNAPWAVTS

SEQ ID NO: 4417 - protein, 13 aa, Artificial sequence
  synthetic peptide
SGSFNAPWAVTSL

SEQ ID NO: 4418 - protein, 13 aa, Artificial sequence
  synthetic peptide
GSFNAPWAVTSLY

SEQ ID NO: 4419 - protein, 13 aa, Artificial sequence
  synthetic peptide
SFNAPWAVTSLYE

SEQ ID NO: 4420 - protein, 13 aa, Artificial sequence
  synthetic peptide
FNAPWAVTSLYEA

SEQ ID NO: 4421 - protein, 13 aa, Artificial sequence
  synthetic peptide
NAPWAVTSLYEAR

SEQ ID NO: 4422 - protein, 13 aa, Artificial sequence
  synthetic peptide
APWAVTSLYEARN

SEQ ID NO: 4423 - protein, 13 aa, Artificial sequence
  synthetic peptide
PWAVTSLYEARNR

SEQ ID NO: 4424 - protein, 13 aa, Artificial sequence
  synthetic peptide
WAVTSLYEARNRT

SEQ ID NO: 4425 - protein, 13 aa, Artificial sequence
  synthetic peptide
AVTSLYEARNRTL

SEQ ID NO: 4426 - protein, 13 aa, Artificial sequence
  synthetic peptide
VTSLYEARNRTLN

SEQ ID NO: 4427 - protein, 13 aa, Artificial sequence
  synthetic peptide
TSLYEARNRTLNL

SEQ ID NO: 4428 - protein, 13 aa, Artificial sequence
  synthetic peptide
SLYEARNRTLNLA

SEQ ID NO: 4429 - protein, 13 aa, Artificial sequence
  synthetic peptide
LYEARNRTLNLAK

SEQ ID NO: 4430 - protein, 13 aa, Artificial sequence
  synthetic peptide
YEARNRTLNLAKL

SEQ ID NO: 4431 - protein, 13 aa, Artificial sequence
  synthetic peptide
EARNRTLNLAKLT

SEQ ID NO: 4432 - protein, 13 aa, Artificial sequence
  synthetic peptide
ARNRTLNLAKLTG

SEQ ID NO: 4433 - protein, 13 aa, Artificial sequence
  synthetic peptide
RNRTLNLAKLTGC

SEQ ID NO: 4434 - protein, 13 aa, Artificial sequence
  synthetic peptide
NRTLNLAKLTGCS

SEQ ID NO: 4435 - protein, 13 aa, Artificial sequence
  synthetic peptide
RTLNLAKLTGCSR

SEQ ID NO: 4436 - protein, 13 aa, Artificial sequence
  synthetic peptide
TLNLAKLTGCSRE

SEQ ID NO: 4437 - protein, 13 aa, Artificial sequence
  synthetic peptide
LNLAKLTGCSREN

SEQ ID NO: 4438 - protein, 13 aa, Artificial sequence
  synthetic peptide
NLAKLTGCSRENE

SEQ ID NO: 4439 - protein, 13 aa, Artificial sequence
  synthetic peptide
LAKLTGCSRENET

SEQ ID NO: 4440 - protein, 13 aa, Artificial sequence
  synthetic peptide
AKLTGCSRENETE

SEQ ID NO: 4441 - protein, 13 aa, Artificial sequence
  synthetic peptide
KLTGCSRENETEI

SEQ ID NO: 4442 - protein, 13 aa, Artificial sequence
  synthetic peptide
LTGCSRENETEII

SEQ ID NO: 4443 - protein, 13 aa, Artificial sequence
  synthetic peptide
TGCSRENETEIIK

SEQ ID NO: 4444 - protein, 13 aa, Artificial sequence
  synthetic peptide
GCSRENETEIIKC

SEQ ID NO: 4445 - protein, 13 aa, Artificial sequence
  synthetic peptide
CSRENETEIIKCL

SEQ ID NO: 4446 - protein, 13 aa, Artificial sequence
  synthetic peptide
SRENETEIIKCLR

SEQ ID NO: 4447 - protein, 13 aa, Artificial sequence
  synthetic peptide
RENETEIIKCLRN

SEQ ID NO: 4448 - protein, 13 aa, Artificial sequence
  synthetic peptide
ENETEIIKCLRNK

SEQ ID NO: 4449 - protein, 13 aa, Artificial sequence
  synthetic peptide
NETEIIKCLRNKD

SEQ ID NO: 4450 - protein, 13 aa, Artificial sequence
  synthetic peptide
ETEIIKCLRNKDP

SEQ ID NO: 4451 - protein, 13 aa, Artificial sequence
  synthetic peptide
TEIIKCLRNKDPQ

SEQ ID NO: 4452 - protein, 13 aa, Artificial sequence
  synthetic peptide
EIIKCLRNKDPQE

SEQ ID NO: 4453 - protein, 13 aa, Artificial sequence
  synthetic peptide
IIKCLRNKDPQEI

SEQ ID NO: 4454 - protein, 13 aa, Artificial sequence
  synthetic peptide
IKCLRNKDPQEIL

SEQ ID NO: 4455 - protein, 13 aa, Artificial sequence
  synthetic peptide
KCLRNKDPQEILL

SEQ ID NO: 4456 - protein, 13 aa, Artificial sequence
  synthetic peptide
CLRNKDPQEILLN

SEQ ID NO: 4457 - protein, 13 aa, Artificial sequence
  synthetic peptide
LRNKDPQEILLNE

SEQ ID NO: 4458 - protein, 13 aa, Artificial sequence
  synthetic peptide
RNKDPQEILLNEA

SEQ ID NO: 4459 - protein, 13 aa, Artificial sequence
  synthetic peptide
NKDPQEILLNEAF

SEQ ID NO: 4460 - protein, 13 aa, Artificial sequence
  synthetic peptide
KDPQEILLNEAFV

SEQ ID NO: 4461 - protein, 13 aa, Artificial sequence
  synthetic peptide
DPQEILLNEAFVV

SEQ ID NO: 4462 - protein, 13 aa, Artificial sequence
  synthetic peptide
PQEILLNEAFVVP

SEQ ID NO: 4463 - protein, 13 aa, Artificial sequence
  synthetic peptide
QEILLNEAFVVPY

SEQ ID NO: 4464 - protein, 13 aa, Artificial sequence
  synthetic peptide
EILLNEAFVVPYG

SEQ ID NO: 4465 - protein, 13 aa, Artificial sequence
  synthetic peptide
ILLNEAFVVPYGT

SEQ ID NO: 4466 - protein, 13 aa, Artificial sequence
  synthetic peptide
LLNEAFVVPYGTP

SEQ ID NO: 4467 - protein, 13 aa, Artificial sequence
  synthetic peptide
LNEAFVVPYGTPL

SEQ ID NO: 4468 - protein, 13 aa, Artificial sequence
  synthetic peptide
NEAFVVPYGTPLS

SEQ ID NO: 4469 - protein, 13 aa, Artificial sequence
  synthetic peptide
EAFVVPYGTPLSV

SEQ ID NO: 4470 - protein, 13 aa, Artificial sequence
  synthetic peptide
AFVVPYGTPLSVN

SEQ ID NO: 4471 - protein, 13 aa, Artificial sequence
  synthetic peptide
FVVPYGTPLSVNF

SEQ ID NO: 4472 - protein, 13 aa, Artificial sequence
  synthetic peptide
VVPYGTPLSVNFG

SEQ ID NO: 4473 - protein, 13 aa, Artificial sequence
  synthetic peptide
VPYGTPLSVNFGP

SEQ ID NO: 4474 - protein, 13 aa, Artificial sequence
  synthetic peptide
PYGTPLSVNFGPT

SEQ ID NO: 4475 - protein, 13 aa, Artificial sequence
  synthetic peptide
YGTPLSVNFGPTV

SEQ ID NO: 4476 - protein, 13 aa, Artificial sequence
  synthetic peptide
GTPLSVNFGPTVD

SEQ ID NO: 4477 - protein, 13 aa, Artificial sequence
  synthetic peptide
TPLSVNFGPTVDG

SEQ ID NO: 4478 - protein, 13 aa, Artificial sequence
  synthetic peptide
PLSVNFGPTVDGD

SEQ ID NO: 4479 - protein, 13 aa, Artificial sequence
  synthetic peptide
LSVNFGPTVDGDF

SEQ ID NO: 4480 - protein, 13 aa, Artificial sequence
  synthetic peptide
SVNFGPTVDGDFL

SEQ ID NO: 4481 - protein, 13 aa, Artificial sequence
  synthetic peptide
VNFGPTVDGDFLT

SEQ ID NO: 4482 - protein, 13 aa, Artificial sequence
  synthetic peptide
NFGPTVDGDFLTD

SEQ ID NO: 4483 - protein, 13 aa, Artificial sequence
  synthetic peptide
FGPTVDGDFLTDM

SEQ ID NO: 4484 - protein, 13 aa, Artificial sequence
  synthetic peptide
GPTVDGDFLTDMP

SEQ ID NO: 4485 - protein, 13 aa, Artificial sequence
  synthetic peptide
PTVDGDFLTDMPD

SEQ ID NO: 4486 - protein, 13 aa, Artificial sequence
  synthetic peptide
TVDGDFLTDMPDI

SEQ ID NO: 4487 - protein, 13 aa, Artificial sequence
  synthetic peptide
VDGDFLTDMPDIL

SEQ ID NO: 4488 - protein, 13 aa, Artificial sequence
  synthetic peptide
DGDFLTDMPDILL

SEQ ID NO: 4489 - protein, 13 aa, Artificial sequence
  synthetic peptide
GDFLTDMPDILLE

SEQ ID NO: 4490 - protein, 13 aa, Artificial sequence
  synthetic peptide
DFLTDMPDILLEL

SEQ ID NO: 4491 - protein, 13 aa, Artificial sequence
  synthetic peptide
FLTDMPDILLELG

SEQ ID NO: 4492 - protein, 13 aa, Artificial sequence
  synthetic peptide
LTDMPDILLELGQ

SEQ ID NO: 4493 - protein, 13 aa, Artificial sequence
  synthetic peptide
TDMPDILLELGQF

SEQ ID NO: 4494 - protein, 13 aa, Artificial sequence
  synthetic peptide
DMPDILLELGQFK

SEQ ID NO: 4495 - protein, 13 aa, Artificial sequence
  synthetic peptide
MPDILLELGQFKK

SEQ ID NO: 4496 - protein, 13 aa, Artificial sequence
  synthetic peptide
PDILLELGQFKKT

SEQ ID NO: 4497 - protein, 13 aa, Artificial sequence
  synthetic peptide
DILLELGQFKKTQ

SEQ ID NO: 4498 - protein, 13 aa, Artificial sequence
  synthetic peptide
ILLELGQFKKTQI

SEQ ID NO: 4499 - protein, 13 aa, Artificial sequence
  synthetic peptide
LLELGQFKKTQIL

SEQ ID NO: 4500 - protein, 13 aa, Artificial sequence
  synthetic peptide
LELGQFKKTQILV

SEQ ID NO: 4501 - protein, 13 aa, Artificial sequence
  synthetic peptide
ELGQFKKTQILVG

SEQ ID NO: 4502 - protein, 13 aa, Artificial sequence
  synthetic peptide
LGQFKKTQILVGV

SEQ ID NO: 4503 - protein, 13 aa, Artificial sequence
  synthetic peptide
GQFKKTQILVGVN

SEQ ID NO: 4504 - protein, 13 aa, Artificial sequence
  synthetic peptide
QFKKTQILVGVNK

SEQ ID NO: 4505 - protein, 13 aa, Artificial sequence
  synthetic peptide
FKKTQILVGVNKD

SEQ ID NO: 4506 - protein, 13 aa, Artificial sequence
  synthetic peptide
KKTQILVGVNKDE

SEQ ID NO: 4507 - protein, 13 aa, Artificial sequence
  synthetic peptide
KTQILVGVNKDEG

SEQ ID NO: 4508 - protein, 13 aa, Artificial sequence
  synthetic peptide
TQILVGVNKDEGT

SEQ ID NO: 4509 - protein, 13 aa, Artificial sequence
  synthetic peptide
QILVGVNKDEGTA

SEQ ID NO: 4510 - protein, 13 aa, Artificial sequence
  synthetic peptide
ILVGVNKDEGTAF

SEQ ID NO: 4511 - protein, 13 aa, Artificial sequence
  synthetic peptide
LVGVNKDEGTAFL

SEQ ID NO: 4512 - protein, 13 aa, Artificial sequence
  synthetic peptide
VGVNKDEGTAFLV

SEQ ID NO: 4513 - protein, 13 aa, Artificial sequence
  synthetic peptide
GVNKDEGTAFLVY

SEQ ID NO: 4514 - protein, 13 aa, Artificial sequence
  synthetic peptide
VNKDEGTAFLVYG

SEQ ID NO: 4515 - protein, 13 aa, Artificial sequence
  synthetic peptide
NKDEGTAFLVYGA

SEQ ID NO: 4516 - protein, 13 aa, Artificial sequence
  synthetic peptide
KDEGTAFLVYGAP

SEQ ID NO: 4517 - protein, 13 aa, Artificial sequence
  synthetic peptide
DEGTAFLVYGAPG

SEQ ID NO: 4518 - protein, 13 aa, Artificial sequence
  synthetic peptide
EGTAFLVYGAPGF

SEQ ID NO: 4519 - protein, 13 aa, Artificial sequence
  synthetic peptide
GTAFLVYGAPGFS

SEQ ID NO: 4520 - protein, 13 aa, Artificial sequence
  synthetic peptide
TAFLVYGAPGFSK

SEQ ID NO: 4521 - protein, 13 aa, Artificial sequence
  synthetic peptide
AFLVYGAPGFSKD

SEQ ID NO: 4522 - protein, 13 aa, Artificial sequence
  synthetic peptide
FLVYGAPGFSKDN

SEQ ID NO: 4523 - protein, 13 aa, Artificial sequence
  synthetic peptide
LVYGAPGFSKDNN

SEQ ID NO: 4524 - protein, 13 aa, Artificial sequence
  synthetic peptide
VYGAPGFSKDNNS

SEQ ID NO: 4525 - protein, 13 aa, Artificial sequence
  synthetic peptide
YGAPGFSKDNNSI

SEQ ID NO: 4526 - protein, 13 aa, Artificial sequence
  synthetic peptide
GAPGFSKDNNSII

SEQ ID NO: 4527 - protein, 13 aa, Artificial sequence
  synthetic peptide
APGFSKDNNSIIT

SEQ ID NO: 4528 - protein, 13 aa, Artificial sequence
  synthetic peptide
PGFSKDNNSIITR

SEQ ID NO: 4529 - protein, 13 aa, Artificial sequence
  synthetic peptide
GFSKDNNSIITRK

SEQ ID NO: 4530 - protein, 13 aa, Artificial sequence
  synthetic peptide
FSKDNNSIITRKE

SEQ ID NO: 4531 - protein, 13 aa, Artificial sequence
  synthetic peptide
SKDNNSIITRKEF

SEQ ID NO: 4532 - protein, 13 aa, Artificial sequence
  synthetic peptide
KDNNSIITRKEFQ

SEQ ID NO: 4533 - protein, 13 aa, Artificial sequence
  synthetic peptide
DNNSIITRKEFQE

SEQ ID NO: 4534 - protein, 13 aa, Artificial sequence
  synthetic peptide
NNSIITRKEFQEG

SEQ ID NO: 4535 - protein, 13 aa, Artificial sequence
  synthetic peptide
NSIITRKEFQEGL

SEQ ID NO: 4536 - protein, 13 aa, Artificial sequence
  synthetic peptide
SIITRKEFQEGLK

SEQ ID NO: 4537 - protein, 13 aa, Artificial sequence
  synthetic peptide
IITRKEFQEGLKI

SEQ ID NO: 4538 - protein, 13 aa, Artificial sequence
  synthetic peptide
ITRKEFQEGLKIF

SEQ ID NO: 4539 - protein, 13 aa, Artificial sequence
  synthetic peptide
TRKEFQEGLKIFF

SEQ ID NO: 4540 - protein, 13 aa, Artificial sequence
  synthetic peptide
RKEFQEGLKIFFP

SEQ ID NO: 4541 - protein, 13 aa, Artificial sequence
  synthetic peptide
KEFQEGLKIFFPG

SEQ ID NO: 4542 - protein, 13 aa, Artificial sequence
  synthetic peptide
EFQEGLKIFFPGV

SEQ ID NO: 4543 - protein, 13 aa, Artificial sequence
  synthetic peptide
FQEGLKIFFPGVS

SEQ ID NO: 4544 - protein, 13 aa, Artificial sequence
  synthetic peptide
QEGLKIFFPGVSE

SEQ ID NO: 4545 - protein, 13 aa, Artificial sequence
  synthetic peptide
EGLKIFFPGVSEF

SEQ ID NO: 4546 - protein, 13 aa, Artificial sequence
  synthetic peptide
GLKIFFPGVSEFG

SEQ ID NO: 4547 - protein, 13 aa, Artificial sequence
  synthetic peptide
LKIFFPGVSEFGK

SEQ ID NO: 4548 - protein, 13 aa, Artificial sequence
  synthetic peptide
KIFFPGVSEFGKE

SEQ ID NO: 4549 - protein, 13 aa, Artificial sequence
  synthetic peptide
IFFPGVSEFGKES

SEQ ID NO: 4550 - protein, 13 aa, Artificial sequence
  synthetic peptide
FFPGVSEFGKESI

SEQ ID NO: 4551 - protein, 13 aa, Artificial sequence
  synthetic peptide
FPGVSEFGKESIL

SEQ ID NO: 4552 - protein, 13 aa, Artificial sequence
  synthetic peptide
PGVSEFGKESILF

SEQ ID NO: 4553 - protein, 13 aa, Artificial sequence
  synthetic peptide
GVSEFGKESILFH

SEQ ID NO: 4554 - protein, 13 aa, Artificial sequence
  synthetic peptide
VSEFGKESILFHY

SEQ ID NO: 4555 - protein, 13 aa, Artificial sequence
  synthetic peptide
SEFGKESILFHYT

SEQ ID NO: 4556 - protein, 13 aa, Artificial sequence
  synthetic peptide
EFGKESILFHYTD

SEQ ID NO: 4557 - protein, 13 aa, Artificial sequence
  synthetic peptide
FGKESILFHYTDW

SEQ ID NO: 4558 - protein, 13 aa, Artificial sequence
  synthetic peptide
GKESILFHYTDWV

SEQ ID NO: 4559 - protein, 13 aa, Artificial sequence
  synthetic peptide
KESILFHYTDWVD

SEQ ID NO: 4560 - protein, 13 aa, Artificial sequence
  synthetic peptide
ESILFHYTDWVDD

SEQ ID NO: 4561 - protein, 13 aa, Artificial sequence
  synthetic peptide
SILFHYTDWVDDQ

SEQ ID NO: 4562 - protein, 13 aa, Artificial sequence
  synthetic peptide
ILFHYTDWVDDQR

SEQ ID NO: 4563 - protein, 13 aa, Artificial sequence
  synthetic peptide
LFHYTDWVDDQRP

SEQ ID NO: 4564 - protein, 13 aa, Artificial sequence
  synthetic peptide
FHYTDWVDDQRPE

SEQ ID NO: 4565 - protein, 13 aa, Artificial sequence
  synthetic peptide
HYTDWVDDQRPEN

SEQ ID NO: 4566 - protein, 13 aa, Artificial sequence
  synthetic peptide
YTDWVDDQRPENY

SEQ ID NO: 4567 - protein, 13 aa, Artificial sequence
  synthetic peptide
TDWVDDQRPENYR

SEQ ID NO: 4568 - protein, 13 aa, Artificial sequence
  synthetic peptide
DWVDDQRPENYRE

SEQ ID NO: 4569 - protein, 13 aa, Artificial sequence
  synthetic peptide
WVDDQRPENYREA

SEQ ID NO: 4570 - protein, 13 aa, Artificial sequence
  synthetic peptide
VDDQRPENYREAL

SEQ ID NO: 4571 - protein, 13 aa, Artificial sequence
  synthetic peptide
DDQRPENYREALG

SEQ ID NO: 4572 - protein, 13 aa, Artificial sequence
  synthetic peptide
DQRPENYREALGD

SEQ ID NO: 4573 - protein, 13 aa, Artificial sequence
  synthetic peptide
QRPENYREALGDV

SEQ ID NO: 4574 - protein, 13 aa, Artificial sequence
  synthetic peptide
RPENYREALGDVV

SEQ ID NO: 4575 - protein, 13 aa, Artificial sequence
  synthetic peptide
PENYREALGDVVG

SEQ ID NO: 4576 - protein, 13 aa, Artificial sequence
  synthetic peptide
ENYREALGDVVGD

SEQ ID NO: 4577 - protein, 13 aa, Artificial sequence
  synthetic peptide
NYREALGDVVGDY

SEQ ID NO: 4578 - protein, 13 aa, Artificial sequence
  synthetic peptide
YREALGDVVGDYN

SEQ ID NO: 4579 - protein, 13 aa, Artificial sequence
  synthetic peptide
REALGDVVGDYNF

SEQ ID NO: 4580 - protein, 13 aa, Artificial sequence
  synthetic peptide
EALGDVVGDYNFI

SEQ ID NO: 4581 - protein, 13 aa, Artificial sequence
  synthetic peptide
ALGDVVGDYNFIC

SEQ ID NO: 4582 - protein, 13 aa, Artificial sequence
  synthetic peptide
LGDVVGDYNFICP

SEQ ID NO: 4583 - protein, 13 aa, Artificial sequence
  synthetic peptide
GDVVGDYNFICPA

SEQ ID NO: 4584 - protein, 13 aa, Artificial sequence
  synthetic peptide
DVVGDYNFICPAL

SEQ ID NO: 4585 - protein, 13 aa, Artificial sequence
  synthetic peptide
VVGDYNFICPALE

SEQ ID NO: 4586 - protein, 13 aa, Artificial sequence
  synthetic peptide
VGDYNFICPALEF

SEQ ID NO: 4587 - protein, 13 aa, Artificial sequence
  synthetic peptide
GDYNFICPALEFT

SEQ ID NO: 4588 - protein, 13 aa, Artificial sequence
  synthetic peptide
DYNFICPALEFTK

SEQ ID NO: 4589 - protein, 13 aa, Artificial sequence
  synthetic peptide
YNFICPALEFTKK

SEQ ID NO: 4590 - protein, 13 aa, Artificial sequence
  synthetic peptide
NFICPALEFTKKF

SEQ ID NO: 4591 - protein, 13 aa, Artificial sequence
  synthetic peptide
FICPALEFTKKFS

SEQ ID NO: 4592 - protein, 13 aa, Artificial sequence
  synthetic peptide
ICPALEFTKKFSE

SEQ ID NO: 4593 - protein, 13 aa, Artificial sequence
  synthetic peptide
CPALEFTKKFSEW

SEQ ID NO: 4594 - protein, 13 aa, Artificial sequence
  synthetic peptide
PALEFTKKFSEWG

SEQ ID NO: 4595 - protein, 13 aa, Artificial sequence
  synthetic peptide
ALEFTKKFSEWGN

SEQ ID NO: 4596 - protein, 13 aa, Artificial sequence
  synthetic peptide
LEFTKKFSEWGNN

SEQ ID NO: 4597 - protein, 13 aa, Artificial sequence
  synthetic peptide
EFTKKFSEWGNNA

SEQ ID NO: 4598 - protein, 13 aa, Artificial sequence
  synthetic peptide
FTKKFSEWGNNAF

SEQ ID NO: 4599 - protein, 13 aa, Artificial sequence
  synthetic peptide
TKKFSEWGNNAFF

SEQ ID NO: 4600 - protein, 13 aa, Artificial sequence
  synthetic peptide
KKFSEWGNNAFFY

SEQ ID NO: 4601 - protein, 13 aa, Artificial sequence
  synthetic peptide
KFSEWGNNAFFYY

SEQ ID NO: 4602 - protein, 13 aa, Artificial sequence
  synthetic peptide
FSEWGNNAFFYYF

SEQ ID NO: 4603 - protein, 13 aa, Artificial sequence
  synthetic peptide
SEWGNNAFFYYFE

SEQ ID NO: 4604 - protein, 13 aa, Artificial sequence
  synthetic peptide
EWGNNAFFYYFEH

SEQ ID NO: 4605 - protein, 13 aa, Artificial sequence
  synthetic peptide
WGNNAFFYYFEHR

SEQ ID NO: 4606 - protein, 13 aa, Artificial sequence
  synthetic peptide
GNNAFFYYFEHRS

SEQ ID NO: 4607 - protein, 13 aa, Artificial sequence
  synthetic peptide
NNAFFYYFEHRSS

SEQ ID NO: 4608 - protein, 13 aa, Artificial sequence
  synthetic peptide
NAFFYYFEHRSSK

SEQ ID NO: 4609 - protein, 13 aa, Artificial sequence
  synthetic peptide
AFFYYFEHRSSKL

SEQ ID NO: 4610 - protein, 13 aa, Artificial sequence
  synthetic peptide
FFYYFEHRSSKLP

SEQ ID NO: 4611 - protein, 13 aa, Artificial sequence
  synthetic peptide
FYYFEHRSSKLPW

SEQ ID NO: 4612 - protein, 13 aa, Artificial sequence
  synthetic peptide
YYFEHRSSKLPWP

SEQ ID NO: 4613 - protein, 13 aa, Artificial sequence
  synthetic peptide
YFEHRSSKLPWPE

SEQ ID NO: 4614 - protein, 13 aa, Artificial sequence
  synthetic peptide
FEHRSSKLPWPEW

SEQ ID NO: 4615 - protein, 13 aa, Artificial sequence
  synthetic peptide
EHRSSKLPWPEWM

SEQ ID NO: 4616 - protein, 13 aa, Artificial sequence
  synthetic peptide
HRSSKLPWPEWMG

SEQ ID NO: 4617 - protein, 13 aa, Artificial sequence
  synthetic peptide
RSSKLPWPEWMGV

SEQ ID NO: 4618 - protein, 13 aa, Artificial sequence
  synthetic peptide
SSKLPWPEWMGVM

SEQ ID NO: 4619 - protein, 13 aa, Artificial sequence
  synthetic peptide
SKLPWPEWMGVMH

SEQ ID NO: 4620 - protein, 13 aa, Artificial sequence
  synthetic peptide
KLPWPEWMGVMHG

SEQ ID NO: 4621 - protein, 13 aa, Artificial sequence
  synthetic peptide
LPWPEWMGVMHGY

SEQ ID NO: 4622 - protein, 13 aa, Artificial sequence
  synthetic peptide
PWPEWMGVMHGYE

SEQ ID NO: 4623 - protein, 13 aa, Artificial sequence
  synthetic peptide
WPEWMGVMHGYEI

SEQ ID NO: 4624 - protein, 13 aa, Artificial sequence
  synthetic peptide
PEWMGVMHGYEIE

SEQ ID NO: 4625 - protein, 13 aa, Artificial sequence
  synthetic peptide
EWMGVMHGYEIEF

SEQ ID NO: 4626 - protein, 13 aa, Artificial sequence
  synthetic peptide
WMGVMHGYEIEFV

SEQ ID NO: 4627 - protein, 13 aa, Artificial sequence
  synthetic peptide
MGVMHGYEIEFVF

SEQ ID NO: 4628 - protein, 13 aa, Artificial sequence
  synthetic peptide
GVMHGYEIEFVFG

SEQ ID NO: 4629 - protein, 13 aa, Artificial sequence
  synthetic peptide
VMHGYEIEFVFGL

SEQ ID NO: 4630 - protein, 13 aa, Artificial sequence
  synthetic peptide
MHGYEIEFVFGLP

SEQ ID NO: 4631 - protein, 13 aa, Artificial sequence
  synthetic peptide
HGYEIEFVFGLPL

SEQ ID NO: 4632 - protein, 13 aa, Artificial sequence
  synthetic peptide
GYEIEFVFGLPLE

SEQ ID NO: 4633 - protein, 13 aa, Artificial sequence
  synthetic peptide
YEIEFVFGLPLER

SEQ ID NO: 4634 - protein, 13 aa, Artificial sequence
  synthetic peptide
EIEFVFGLPLERR

SEQ ID NO: 4635 - protein, 13 aa, Artificial sequence
  synthetic peptide
IEFVFGLPLERRD

SEQ ID NO: 4636 - protein, 13 aa, Artificial sequence
  synthetic peptide
EFVFGLPLERRDN

SEQ ID NO: 4637 - protein, 13 aa, Artificial sequence
  synthetic peptide
FVFGLPLERRDNY

SEQ ID NO: 4638 - protein, 13 aa, Artificial sequence
  synthetic peptide
VFGLPLERRDNYT

SEQ ID NO: 4639 - protein, 13 aa, Artificial sequence
  synthetic peptide
FGLPLERRDNYTK

SEQ ID NO: 4640 - protein, 13 aa, Artificial sequence
  synthetic peptide
GLPLERRDNYTKA

SEQ ID NO: 4641 - protein, 13 aa, Artificial sequence
  synthetic peptide
LPLERRDNYTKAE

SEQ ID NO: 4642 - protein, 13 aa, Artificial sequence
  synthetic peptide
PLERRDNYTKAEE

SEQ ID NO: 4643 - protein, 13 aa, Artificial sequence
  synthetic peptide
LERRDNYTKAEEI

SEQ ID NO: 4644 - protein, 13 aa, Artificial sequence
  synthetic peptide
ERRDNYTKAEEIL

SEQ ID NO: 4645 - protein, 13 aa, Artificial sequence
  synthetic peptide
RRDNYTKAEEILS

SEQ ID NO: 4646 - protein, 13 aa, Artificial sequence
  synthetic peptide
RDNYTKAEEILSR

SEQ ID NO: 4647 - protein, 13 aa, Artificial sequence
  synthetic peptide
DNYTKAEEILSRS

SEQ ID NO: 4648 - protein, 13 aa, Artificial sequence
  synthetic peptide
NYTKAEEILSRSI

SEQ ID NO: 4649 - protein, 13 aa, Artificial sequence
  synthetic peptide
YTKAEEILSRSIV

SEQ ID NO: 4650 - protein, 13 aa, Artificial sequence
  synthetic peptide
TKAEEILSRSIVK

SEQ ID NO: 4651 - protein, 13 aa, Artificial sequence
  synthetic peptide
KAEEILSRSIVKR

SEQ ID NO: 4652 - protein, 13 aa, Artificial sequence
  synthetic peptide
AEEILSRSIVKRW

SEQ ID NO: 4653 - protein, 13 aa, Artificial sequence
  synthetic peptide
EEILSRSIVKRWA

SEQ ID NO: 4654 - protein, 13 aa, Artificial sequence
  synthetic peptide
EILSRSIVKRWAN

SEQ ID NO: 4655 - protein, 13 aa, Artificial sequence
  synthetic peptide
ILSRSIVKRWANF

SEQ ID NO: 4656 - protein, 13 aa, Artificial sequence
  synthetic peptide
LSRSIVKRWANFA

SEQ ID NO: 4657 - protein, 13 aa, Artificial sequence
  synthetic peptide
SRSIVKRWANFAK

SEQ ID NO: 4658 - protein, 13 aa, Artificial sequence
  synthetic peptide
RSIVKRWANFAKY

SEQ ID NO: 4659 - protein, 13 aa, Artificial sequence
  synthetic peptide
SIVKRWANFAKYG

SEQ ID NO: 4660 - protein, 13 aa, Artificial sequence
  synthetic peptide
IVKRWANFAKYGN

SEQ ID NO: 4661 - protein, 13 aa, Artificial sequence
  synthetic peptide
VKRWANFAKYGNP

SEQ ID NO: 4662 - protein, 13 aa, Artificial sequence
  synthetic peptide
KRWANFAKYGNPN

SEQ ID NO: 4663 - protein, 13 aa, Artificial sequence
  synthetic peptide
RWANFAKYGNPNE

SEQ ID NO: 4664 - protein, 13 aa, Artificial sequence
  synthetic peptide
WANFAKYGNPNET

SEQ ID NO: 4665 - protein, 13 aa, Artificial sequence
  synthetic peptide
ANFAKYGNPNETQ

SEQ ID NO: 4666 - protein, 13 aa, Artificial sequence
  synthetic peptide
NFAKYGNPNETQN

SEQ ID NO: 4667 - protein, 13 aa, Artificial sequence
  synthetic peptide
FAKYGNPNETQNN

SEQ ID NO: 4668 - protein, 13 aa, Artificial sequence
  synthetic peptide
AKYGNPNETQNNS

SEQ ID NO: 4669 - protein, 13 aa, Artificial sequence
  synthetic peptide
KYGNPNETQNNST

SEQ ID NO: 4670 - protein, 13 aa, Artificial sequence
  synthetic peptide
YGNPNETQNNSTS

SEQ ID NO: 4671 - protein, 13 aa, Artificial sequence
  synthetic peptide
GNPNETQNNSTSW

SEQ ID NO: 4672 - protein, 13 aa, Artificial sequence
  synthetic peptide
NPNETQNNSTSWP

SEQ ID NO: 4673 - protein, 13 aa, Artificial sequence
  synthetic peptide
PNETQNNSTSWPV

SEQ ID NO: 4674 - protein, 13 aa, Artificial sequence
  synthetic peptide
NETQNNSTSWPVF

SEQ ID NO: 4675 - protein, 13 aa, Artificial sequence
  synthetic peptide
ETQNNSTSWPVFK

SEQ ID NO: 4676 - protein, 13 aa, Artificial sequence
  synthetic peptide
TQNNSTSWPVFKS

SEQ ID NO: 4677 - protein, 13 aa, Artificial sequence
  synthetic peptide
QNNSTSWPVFKST

SEQ ID NO: 4678 - protein, 13 aa, Artificial sequence
  synthetic peptide
NNSTSWPVFKSTE

SEQ ID NO: 4679 - protein, 13 aa, Artificial sequence
  synthetic peptide
NSTSWPVFKSTEQ

SEQ ID NO: 4680 - protein, 13 aa, Artificial sequence
  synthetic peptide
STSWPVFKSTEQK

SEQ ID NO: 4681 - protein, 13 aa, Artificial sequence
  synthetic peptide
TSWPVFKSTEQKY

SEQ ID NO: 4682 - protein, 13 aa, Artificial sequence
  synthetic peptide
SWPVFKSTEQKYL

SEQ ID NO: 4683 - protein, 13 aa, Artificial sequence
  synthetic peptide
WPVFKSTEQKYLT

SEQ ID NO: 4684 - protein, 13 aa, Artificial sequence
  synthetic peptide
PVFKSTEQKYLTL

SEQ ID NO: 4685 - protein, 13 aa, Artificial sequence
  synthetic peptide
VFKSTEQKYLTLN

SEQ ID NO: 4686 - protein, 13 aa, Artificial sequence
  synthetic peptide
FKSTEQKYLTLNT

SEQ ID NO: 4687 - protein, 13 aa, Artificial sequence
  synthetic peptide
KSTEQKYLTLNTE

SEQ ID NO: 4688 - protein, 13 aa, Artificial sequence
  synthetic peptide
STEQKYLTLNTES

SEQ ID NO: 4689 - protein, 13 aa, Artificial sequence
  synthetic peptide
TEQKYLTLNTEST

SEQ ID NO: 4690 - protein, 13 aa, Artificial sequence
  synthetic peptide
EQKYLTLNTESTR

SEQ ID NO: 4691 - protein, 13 aa, Artificial sequence
  synthetic peptide
QKYLTLNTESTRI

SEQ ID NO: 4692 - protein, 13 aa, Artificial sequence
  synthetic peptide
KYLTLNTESTRIM

SEQ ID NO: 4693 - protein, 13 aa, Artificial sequence
  synthetic peptide
YLTLNTESTRIMT

SEQ ID NO: 4694 - protein, 13 aa, Artificial sequence
  synthetic peptide
LTLNTESTRIMTK

SEQ ID NO: 4695 - protein, 13 aa, Artificial sequence
  synthetic peptide
TLNTESTRIMTKL

SEQ ID NO: 4696 - protein, 13 aa, Artificial sequence
  synthetic peptide
LNTESTRIMTKLR

SEQ ID NO: 4697 - protein, 13 aa, Artificial sequence
  synthetic peptide
NTESTRIMTKLRA

SEQ ID NO: 4698 - protein, 13 aa, Artificial sequence
  synthetic peptide
TESTRIMTKLRAQ

SEQ ID NO: 4699 - protein, 13 aa, Artificial sequence
  synthetic peptide
ESTRIMTKLRAQQ

SEQ ID NO: 4700 - protein, 13 aa, Artificial sequence
  synthetic peptide
STRIMTKLRAQQC

SEQ ID NO: 4701 - protein, 13 aa, Artificial sequence
  synthetic peptide
TRIMTKLRAQQCR

SEQ ID NO: 4702 - protein, 13 aa, Artificial sequence
  synthetic peptide
RIMTKLRAQQCRF

SEQ ID NO: 4703 - protein, 13 aa, Artificial sequence
  synthetic peptide
IMTKLRAQQCRFW

SEQ ID NO: 4704 - protein, 13 aa, Artificial sequence
  synthetic peptide
MTKLRAQQCRFWT

SEQ ID NO: 4705 - protein, 13 aa, Artificial sequence
  synthetic peptide
TKLRAQQCRFWTS

SEQ ID NO: 4706 - protein, 13 aa, Artificial sequence
  synthetic peptide
KLRAQQCRFWTSF

SEQ ID NO: 4707 - protein, 13 aa, Artificial sequence
  synthetic peptide
LRAQQCRFWTSFF

SEQ ID NO: 4708 - protein, 13 aa, Artificial sequence
  synthetic peptide
RAQQCRFWTSFFP

SEQ ID NO: 4709 - protein, 13 aa, Artificial sequence
  synthetic peptide
AQQCRFWTSFFPK

SEQ ID NO: 4710 - protein, 13 aa, Artificial sequence
  synthetic peptide
QQCRFWTSFFPKV

SEQ ID NO: 4711 - protein, 13 aa, Artificial sequence
  synthetic peptide
QCRFWTSFFPKVL

SEQ ID NO: 4712 - protein, 13 aa, Artificial sequence
  synthetic peptide
CRFWTSFFPKVLE

SEQ ID NO: 4713 - protein, 13 aa, Artificial sequence
  synthetic peptide
RFWTSFFPKVLEM

SEQ ID NO: 4714 - protein, 13 aa, Artificial sequence
  synthetic peptide
FWTSFFPKVLEMT

SEQ ID NO: 4715 - protein, 13 aa, Artificial sequence
  synthetic peptide
WTSFFPKVLEMTG

SEQ ID NO: 4716 - protein, 13 aa, Artificial sequence
  synthetic peptide
TSFFPKVLEMTGN

SEQ ID NO: 4717 - protein, 13 aa, Artificial sequence
  synthetic peptide
SFFPKVLEMTGNI

SEQ ID NO: 4718 - protein, 13 aa, Artificial sequence
  synthetic peptide
FFPKVLEMTGNID

SEQ ID NO: 4719 - protein, 13 aa, Artificial sequence
  synthetic peptide
FPKVLEMTGNIDE

SEQ ID NO: 4720 - protein, 13 aa, Artificial sequence
  synthetic peptide
PKVLEMTGNIDEA

SEQ ID NO: 4721 - protein, 13 aa, Artificial sequence
  synthetic peptide
KVLEMTGNIDEAE

SEQ ID NO: 4722 - protein, 13 aa, Artificial sequence
  synthetic peptide
VLEMTGNIDEAEW

SEQ ID NO: 4723 - protein, 13 aa, Artificial sequence
  synthetic peptide
LEMTGNIDEAEWE

SEQ ID NO: 4724 - protein, 13 aa, Artificial sequence
  synthetic peptide
EMTGNIDEAEWEW

SEQ ID NO: 4725 - protein, 13 aa, Artificial sequence
  synthetic peptide
MTGNIDEAEWEWK

SEQ ID NO: 4726 - protein, 13 aa, Artificial sequence
  synthetic peptide
TGNIDEAEWEWKA

SEQ ID NO: 4727 - protein, 13 aa, Artificial sequence
  synthetic peptide
GNIDEAEWEWKAG

SEQ ID NO: 4728 - protein, 13 aa, Artificial sequence
  synthetic peptide
NIDEAEWEWKAGF

SEQ ID NO: 4729 - protein, 13 aa, Artificial sequence
  synthetic peptide
IDEAEWEWKAGFH

SEQ ID NO: 4730 - protein, 13 aa, Artificial sequence
  synthetic peptide
DEAEWEWKAGFHR

SEQ ID NO: 4731 - protein, 13 aa, Artificial sequence
  synthetic peptide
EAEWEWKAGFHRW

SEQ ID NO: 4732 - protein, 13 aa, Artificial sequence
  synthetic peptide
AEWEWKAGFHRWN

SEQ ID NO: 4733 - protein, 13 aa, Artificial sequence
  synthetic peptide
EWEWKAGFHRWNN

SEQ ID NO: 4734 - protein, 13 aa, Artificial sequence
  synthetic peptide
WEWKAGFHRWNNY

SEQ ID NO: 4735 - protein, 13 aa, Artificial sequence
  synthetic peptide
EWKAGFHRWNNYM

SEQ ID NO: 4736 - protein, 13 aa, Artificial sequence
  synthetic peptide
WKAGFHRWNNYMM

SEQ ID NO: 4737 - protein, 13 aa, Artificial sequence
  synthetic peptide
KAGFHRWNNYMMD

SEQ ID NO: 4738 - protein, 13 aa, Artificial sequence
  synthetic peptide
AGFHRWNNYMMDW

SEQ ID NO: 4739 - protein, 13 aa, Artificial sequence
  synthetic peptide
GFHRWNNYMMDWK

SEQ ID NO: 4740 - protein, 13 aa, Artificial sequence
  synthetic peptide
FHRWNNYMMDWKN

SEQ ID NO: 4741 - protein, 13 aa, Artificial sequence
  synthetic peptide
HRWNNYMMDWKNQ

SEQ ID NO: 4742 - protein, 13 aa, Artificial sequence
  synthetic peptide
RWNNYMMDWKNQF

SEQ ID NO: 4743 - protein, 13 aa, Artificial sequence
  synthetic peptide
WNNYMMDWKNQFN

SEQ ID NO: 4744 - protein, 13 aa, Artificial sequence
  synthetic peptide
NNYMMDWKNQFND

SEQ ID NO: 4745 - protein, 13 aa, Artificial sequence
  synthetic peptide
NYMMDWKNQFNDY

SEQ ID NO: 4746 - protein, 13 aa, Artificial sequence
  synthetic peptide
YMMDWKNQFNDYT

SEQ ID NO: 4747 - protein, 13 aa, Artificial sequence
  synthetic peptide
MMDWKNQFNDYTS

SEQ ID NO: 4748 - protein, 13 aa, Artificial sequence
  synthetic peptide
MDWKNQFNDYTSK

SEQ ID NO: 4749 - protein, 13 aa, Artificial sequence
  synthetic peptide
DWKNQFNDYTSKK

SEQ ID NO: 4750 - protein, 13 aa, Artificial sequence
  synthetic peptide
WKNQFNDYTSKKE

SEQ ID NO: 4751 - protein, 13 aa, Artificial sequence
  synthetic peptide
KNQFNDYTSKKES

SEQ ID NO: 4752 - protein, 13 aa, Artificial sequence
  synthetic peptide
NQFNDYTSKKESC

SEQ ID NO: 4753 - protein, 13 aa, Artificial sequence
  synthetic peptide
QFNDYTSKKESCV

SEQ ID NO: 4754 - protein, 13 aa, Artificial sequence
  synthetic peptide
FNDYTSKKESCVG

SEQ ID NO: 4755 - protein, 13 aa, Artificial sequence
  synthetic peptide
NDYTSKKESCVGL

SEQ ID NO: 4756 - protein, 14 aa, Artificial sequence
  synthetic peptide
MHSKVTIICIRFLF

SEQ ID NO: 4757 - protein, 14 aa, Artificial sequence
  synthetic peptide
HSKVTIICIRFLFW

SEQ ID NO: 4758 - protein, 14 aa, Artificial sequence
  synthetic peptide
SKVTIICIRFLFWF

SEQ ID NO: 4759 - protein, 14 aa, Artificial sequence
  synthetic peptide
KVTIICIRFLFWFL

SEQ ID NO: 4760 - protein, 14 aa, Artificial sequence
  synthetic peptide
VTIICIRFLFWFLL

SEQ ID NO: 4761 - protein, 14 aa, Artificial sequence
  synthetic peptide
TIICIRFLFWFLLL

SEQ ID NO: 4762 - protein, 14 aa, Artificial sequence
  synthetic peptide
IICIRFLFWFLLLC

SEQ ID NO: 4763 - protein, 14 aa, Artificial sequence
  synthetic peptide
ICIRFLFWFLLLCM

SEQ ID NO: 4764 - protein, 14 aa, Artificial sequence
  synthetic peptide
CIRFLFWFLLLCML

SEQ ID NO: 4765 - protein, 14 aa, Artificial sequence
  synthetic peptide
IRFLFWFLLLCMLI

SEQ ID NO: 4766 - protein, 14 aa, Artificial sequence
  synthetic peptide
RFLFWFLLLCMLIG

SEQ ID NO: 4767 - protein, 14 aa, Artificial sequence
  synthetic peptide
FLFWFLLLCMLIGK

SEQ ID NO: 4768 - protein, 14 aa, Artificial sequence
  synthetic peptide
LFWFLLLCMLIGKS

SEQ ID NO: 4769 - protein, 14 aa, Artificial sequence
  synthetic peptide
FWFLLLCMLIGKSH

SEQ ID NO: 4770 - protein, 14 aa, Artificial sequence
  synthetic peptide
WFLLLCMLIGKSHT

SEQ ID NO: 4771 - protein, 14 aa, Artificial sequence
  synthetic peptide
FLLLCMLIGKSHTE

SEQ ID NO: 4772 - protein, 14 aa, Artificial sequence
  synthetic peptide
LLLCMLIGKSHTED

SEQ ID NO: 4773 - protein, 14 aa, Artificial sequence
  synthetic peptide
LLCMLIGKSHTEDD

SEQ ID NO: 4774 - protein, 14 aa, Artificial sequence
  synthetic peptide
LCMLIGKSHTEDDI

SEQ ID NO: 4775 - protein, 14 aa, Artificial sequence
  synthetic peptide
CMLIGKSHTEDDII

SEQ ID NO: 4776 - protein, 14 aa, Artificial sequence
  synthetic peptide
MLIGKSHTEDDIII

SEQ ID NO: 4777 - protein, 14 aa, Artificial sequence
  synthetic peptide
LIGKSHTEDDIIIA

SEQ ID NO: 4778 - protein, 14 aa, Artificial sequence
  synthetic peptide
IGKSHTEDDIIIAT

SEQ ID NO: 4779 - protein, 14 aa, Artificial sequence
  synthetic peptide
GKSHTEDDIIIATK

SEQ ID NO: 4780 - protein, 14 aa, Artificial sequence
  synthetic peptide
KSHTEDDIIIATKN

SEQ ID NO: 4781 - protein, 14 aa, Artificial sequence
  synthetic peptide
SHTEDDIIIATKNG

SEQ ID NO: 4782 - protein, 14 aa, Artificial sequence
  synthetic peptide
HTEDDIIIATKNGK

SEQ ID NO: 4783 - protein, 14 aa, Artificial sequence
  synthetic peptide
TEDDIIIATKNGKV

SEQ ID NO: 4784 - protein, 14 aa, Artificial sequence
  synthetic peptide
EDDIIIATKNGKVR

SEQ ID NO: 4785 - protein, 14 aa, Artificial sequence
  synthetic peptide
DDIIIATKNGKVRG

SEQ ID NO: 4786 - protein, 14 aa, Artificial sequence
  synthetic peptide
DIIIATKNGKVRGM

SEQ ID NO: 4787 - protein, 14 aa, Artificial sequence
  synthetic peptide
IIIATKNGKVRGMN

SEQ ID NO: 4788 - protein, 14 aa, Artificial sequence
  synthetic peptide
IIATKNGKVRGMNL

SEQ ID NO: 4789 - protein, 14 aa, Artificial sequence
  synthetic peptide
IATKNGKVRGMNLT

SEQ ID NO: 4790 - protein, 14 aa, Artificial sequence
  synthetic peptide
ATKNGKVRGMNLTV

SEQ ID NO: 4791 - protein, 14 aa, Artificial sequence
  synthetic peptide
TKNGKVRGMNLTVF

SEQ ID NO: 4792 - protein, 14 aa, Artificial sequence
  synthetic peptide
KNGKVRGMNLTVFG

SEQ ID NO: 4793 - protein, 14 aa, Artificial sequence
  synthetic peptide
NGKVRGMNLTVFGG

SEQ ID NO: 4794 - protein, 14 aa, Artificial sequence
  synthetic peptide
GKVRGMNLTVFGGT

SEQ ID NO: 4795 - protein, 14 aa, Artificial sequence
  synthetic peptide
KVRGMNLTVFGGTV

SEQ ID NO: 4796 - protein, 14 aa, Artificial sequence
  synthetic peptide
VRGMNLTVFGGTVT

SEQ ID NO: 4797 - protein, 14 aa, Artificial sequence
  synthetic peptide
RGMNLTVFGGTVTA

SEQ ID NO: 4798 - protein, 14 aa, Artificial sequence
  synthetic peptide
GMNLTVFGGTVTAF

SEQ ID NO: 4799 - protein, 14 aa, Artificial sequence
  synthetic peptide
MNLTVFGGTVTAFL

SEQ ID NO: 4800 - protein, 14 aa, Artificial sequence
  synthetic peptide
NLTVFGGTVTAFLG

SEQ ID NO: 4801 - protein, 14 aa, Artificial sequence
  synthetic peptide
LTVFGGTVTAFLGI

SEQ ID NO: 4802 - protein, 14 aa, Artificial sequence
  synthetic peptide
TVFGGTVTAFLGIP

SEQ ID NO: 4803 - protein, 14 aa, Artificial sequence
  synthetic peptide
VFGGTVTAFLGIPY

SEQ ID NO: 4804 - protein, 14 aa, Artificial sequence
  synthetic peptide
FGGTVTAFLGIPYA

SEQ ID NO: 4805 - protein, 14 aa, Artificial sequence
  synthetic peptide
GGTVTAFLGIPYAQ

SEQ ID NO: 4806 - protein, 14 aa, Artificial sequence
  synthetic peptide
GTVTAFLGIPYAQP

SEQ ID NO: 4807 - protein, 14 aa, Artificial sequence
  synthetic peptide
TVTAFLGIPYAQPP

SEQ ID NO: 4808 - protein, 14 aa, Artificial sequence
  synthetic peptide
VTAFLGIPYAQPPL

SEQ ID NO: 4809 - protein, 14 aa, Artificial sequence
  synthetic peptide
TAFLGIPYAQPPLG

SEQ ID NO: 4810 - protein, 14 aa, Artificial sequence
  synthetic peptide
AFLGIPYAQPPLGR

SEQ ID NO: 4811 - protein, 14 aa, Artificial sequence
  synthetic peptide
FLGIPYAQPPLGRL

SEQ ID NO: 4812 - protein, 14 aa, Artificial sequence
  synthetic peptide
LGIPYAQPPLGRLR

SEQ ID NO: 4813 - protein, 14 aa, Artificial sequence
  synthetic peptide
GIPYAQPPLGRLRF

SEQ ID NO: 4814 - protein, 14 aa, Artificial sequence
  synthetic peptide
IPYAQPPLGRLRFK

SEQ ID NO: 4815 - protein, 14 aa, Artificial sequence
  synthetic peptide
PYAQPPLGRLRFKK

SEQ ID NO: 4816 - protein, 14 aa, Artificial sequence
  synthetic peptide
YAQPPLGRLRFKKP

SEQ ID NO: 4817 - protein, 14 aa, Artificial sequence
  synthetic peptide
AQPPLGRLRFKKPQ

SEQ ID NO: 4818 - protein, 14 aa, Artificial sequence
  synthetic peptide
QPPLGRLRFKKPQS

SEQ ID NO: 4819 - protein, 14 aa, Artificial sequence
  synthetic peptide
PPLGRLRFKKPQSL

SEQ ID NO: 4820 - protein, 14 aa, Artificial sequence
  synthetic peptide
PLGRLRFKKPQSLT

SEQ ID NO: 4821 - protein, 14 aa, Artificial sequence
  synthetic peptide
LGRLRFKKPQSLTK

SEQ ID NO: 4822 - protein, 14 aa, Artificial sequence
  synthetic peptide
GRLRFKKPQSLTKW

SEQ ID NO: 4823 - protein, 14 aa, Artificial sequence
  synthetic peptide
RLRFKKPQSLTKWS

SEQ ID NO: 4824 - protein, 14 aa, Artificial sequence
  synthetic peptide
LRFKKPQSLTKWSD

SEQ ID NO: 4825 - protein, 14 aa, Artificial sequence
  synthetic peptide
RFKKPQSLTKWSDI

SEQ ID NO: 4826 - protein, 14 aa, Artificial sequence
  synthetic peptide
FKKPQSLTKWSDIW

SEQ ID NO: 4827 - protein, 14 aa, Artificial sequence
  synthetic peptide
KKPQSLTKWSDIWN

SEQ ID NO: 4828 - protein, 14 aa, Artificial sequence
  synthetic peptide
KPQSLTKWSDIWNA

SEQ ID NO: 4829 - protein, 14 aa, Artificial sequence
  synthetic peptide
PQSLTKWSDIWNAT

SEQ ID NO: 4830 - protein, 14 aa, Artificial sequence
  synthetic peptide
QSLTKWSDIWNATK

SEQ ID NO: 4831 - protein, 14 aa, Artificial sequence
  synthetic peptide
SLTKWSDIWNATKY

SEQ ID NO: 4832 - protein, 14 aa, Artificial sequence
  synthetic peptide
LTKWSDIWNATKYA

SEQ ID NO: 4833 - protein, 14 aa, Artificial sequence
  synthetic peptide
TKWSDIWNATKYAN

SEQ ID NO: 4834 - protein, 14 aa, Artificial sequence
  synthetic peptide
KWSDIWNATKYANS

SEQ ID NO: 4835 - protein, 14 aa, Artificial sequence
  synthetic peptide
WSDIWNATKYANSC

SEQ ID NO: 4836 - protein, 14 aa, Artificial sequence
  synthetic peptide
SDIWNATKYANSCC

SEQ ID NO: 4837 - protein, 14 aa, Artificial sequence
  synthetic peptide
DIWNATKYANSCCQ

SEQ ID NO: 4838 - protein, 14 aa, Artificial sequence
  synthetic peptide
IWNATKYANSCCQN

SEQ ID NO: 4839 - protein, 14 aa, Artificial sequence
  synthetic peptide
WNATKYANSCCQNI

SEQ ID NO: 4840 - protein, 14 aa, Artificial sequence
  synthetic peptide
NATKYANSCCQNID

SEQ ID NO: 4841 - protein, 14 aa, Artificial sequence
  synthetic peptide
ATKYANSCCQNIDQ

SEQ ID NO: 4842 - protein, 14 aa, Artificial sequence
  synthetic peptide
TKYANSCCQNIDQS

SEQ ID NO: 4843 - protein, 14 aa, Artificial sequence
  synthetic peptide
KYANSCCQNIDQSF

SEQ ID NO: 4844 - protein, 14 aa, Artificial sequence
  synthetic peptide
YANSCCQNIDQSFP

SEQ ID NO: 4845 - protein, 14 aa, Artificial sequence
  synthetic peptide
ANSCCQNIDQSFPG

SEQ ID NO: 4846 - protein, 14 aa, Artificial sequence
  synthetic peptide
NSCCQNIDQSFPGF

SEQ ID NO: 4847 - protein, 14 aa, Artificial sequence
  synthetic peptide
SCCQNIDQSFPGFH

SEQ ID NO: 4848 - protein, 14 aa, Artificial sequence
  synthetic peptide
CCQNIDQSFPGFHG

SEQ ID NO: 4849 - protein, 14 aa, Artificial sequence
  synthetic peptide
CQNIDQSFPGFHGS

SEQ ID NO: 4850 - protein, 14 aa, Artificial sequence
  synthetic peptide
QNIDQSFPGFHGSE

SEQ ID NO: 4851 - protein, 14 aa, Artificial sequence
  synthetic peptide
NIDQSFPGFHGSEM

SEQ ID NO: 4852 - protein, 14 aa, Artificial sequence
  synthetic peptide
IDQSFPGFHGSEMW

SEQ ID NO: 4853 - protein, 14 aa, Artificial sequence
  synthetic peptide
DQSFPGFHGSEMWN

SEQ ID NO: 4854 - protein, 14 aa, Artificial sequence
  synthetic peptide
QSFPGFHGSEMWNP

SEQ ID NO: 4855 - protein, 14 aa, Artificial sequence
  synthetic peptide
SFPGFHGSEMWNPN

SEQ ID NO: 4856 - protein, 14 aa, Artificial sequence
  synthetic peptide
FPGFHGSEMWNPNT

SEQ ID NO: 4857 - protein, 14 aa, Artificial sequence
  synthetic peptide
PGFHGSEMWNPNTD

SEQ ID NO: 4858 - protein, 14 aa, Artificial sequence
  synthetic peptide
GFHGSEMWNPNTDL

SEQ ID NO: 4859 - protein, 14 aa, Artificial sequence
  synthetic peptide
FHGSEMWNPNTDLS

SEQ ID NO: 4860 - protein, 14 aa, Artificial sequence
  synthetic peptide
HGSEMWNPNTDLSE

SEQ ID NO: 4861 - protein, 14 aa, Artificial sequence
  synthetic peptide
GSEMWNPNTDLSED

SEQ ID NO: 4862 - protein, 14 aa, Artificial sequence
  synthetic peptide
SEMWNPNTDLSEDC

SEQ ID NO: 4863 - protein, 14 aa, Artificial sequence
  synthetic peptide
EMWNPNTDLSEDCL

SEQ ID NO: 4864 - protein, 14 aa, Artificial sequence
  synthetic peptide
MWNPNTDLSEDCLY

SEQ ID NO: 4865 - protein, 14 aa, Artificial sequence
  synthetic peptide
WNPNTDLSEDCLYL

SEQ ID NO: 4866 - protein, 14 aa, Artificial sequence
  synthetic peptide
NPNTDLSEDCLYLN

SEQ ID NO: 4867 - protein, 14 aa, Artificial sequence
  synthetic peptide
PNTDLSEDCLYLNV

SEQ ID NO: 4868 - protein, 14 aa, Artificial sequence
  synthetic peptide
NTDLSEDCLYLNVW

SEQ ID NO: 4869 - protein, 14 aa, Artificial sequence
  synthetic peptide
TDLSEDCLYLNVWI

SEQ ID NO: 4870 - protein, 14 aa, Artificial sequence
  synthetic peptide
DLSEDCLYLNVWIP

SEQ ID NO: 4871 - protein, 14 aa, Artificial sequence
  synthetic peptide
LSEDCLYLNVWIPA

SEQ ID NO: 4872 - protein, 14 aa, Artificial sequence
  synthetic peptide
SEDCLYLNVWIPAP

SEQ ID NO: 4873 - protein, 14 aa, Artificial sequence
  synthetic peptide
EDCLYLNVWIPAPK

SEQ ID NO: 4874 - protein, 14 aa, Artificial sequence
  synthetic peptide
DCLYLNVWIPAPKP

SEQ ID NO: 4875 - protein, 14 aa, Artificial sequence
  synthetic peptide
CLYLNVWIPAPKPK

SEQ ID NO: 4876 - protein, 14 aa, Artificial sequence
  synthetic peptide
LYLNVWIPAPKPKN

SEQ ID NO: 4877 - protein, 14 aa, Artificial sequence
  synthetic peptide
YLNVWIPAPKPKNA

SEQ ID NO: 4878 - protein, 14 aa, Artificial sequence
  synthetic peptide
LNVWIPAPKPKNAT

SEQ ID NO: 4879 - protein, 14 aa, Artificial sequence
  synthetic peptide
NVWIPAPKPKNATV

SEQ ID NO: 4880 - protein, 14 aa, Artificial sequence
  synthetic peptide
VWIPAPKPKNATVL

SEQ ID NO: 4881 - protein, 14 aa, Artificial sequence
  synthetic peptide
WIPAPKPKNATVLI

SEQ ID NO: 4882 - protein, 14 aa, Artificial sequence
  synthetic peptide
IPAPKPKNATVLIW

SEQ ID NO: 4883 - protein, 14 aa, Artificial sequence
  synthetic peptide
PAPKPKNATVLIWI

SEQ ID NO: 4884 - protein, 14 aa, Artificial sequence
  synthetic peptide
APKPKNATVLIWIY

SEQ ID NO: 4885 - protein, 14 aa, Artificial sequence
  synthetic peptide
PKPKNATVLIWIYG

SEQ ID NO: 4886 - protein, 14 aa, Artificial sequence
  synthetic peptide
KPKNATVLIWIYGG

SEQ ID NO: 4887 - protein, 14 aa, Artificial sequence
  synthetic peptide
PKNATVLIWIYGGG

SEQ ID NO: 4888 - protein, 14 aa, Artificial sequence
  synthetic peptide
KNATVLIWIYGGGF

SEQ ID NO: 4889 - protein, 14 aa, Artificial sequence
  synthetic peptide
NATVLIWIYGGGFQ

SEQ ID NO: 4890 - protein, 14 aa, Artificial sequence
  synthetic peptide
ATVLIWIYGGGFQT

SEQ ID NO: 4891 - protein, 14 aa, Artificial sequence
  synthetic peptide
TVLIWIYGGGFQTG

SEQ ID NO: 4892 - protein, 14 aa, Artificial sequence
  synthetic peptide
VLIWIYGGGFQTGT

SEQ ID NO: 4893 - protein, 14 aa, Artificial sequence
  synthetic peptide
LIWIYGGGFQTGTS

SEQ ID NO: 4894 - protein, 14 aa, Artificial sequence
  synthetic peptide
IWIYGGGFQTGTSS

SEQ ID NO: 4895 - protein, 14 aa, Artificial sequence
  synthetic peptide
WIYGGGFQTGTSSL

SEQ ID NO: 4896 - protein, 14 aa, Artificial sequence
  synthetic peptide
IYGGGFQTGTSSLH

SEQ ID NO: 4897 - protein, 14 aa, Artificial sequence
  synthetic peptide
YGGGFQTGTSSLHV

SEQ ID NO: 4898 - protein, 14 aa, Artificial sequence
  synthetic peptide
GGGFQTGTSSLHVY

SEQ ID NO: 4899 - protein, 14 aa, Artificial sequence
  synthetic peptide
GGFQTGTSSLHVYD

SEQ ID NO: 4900 - protein, 14 aa, Artificial sequence
  synthetic peptide
GFQTGTSSLHVYDG

SEQ ID NO: 4901 - protein, 14 aa, Artificial sequence
  synthetic peptide
FQTGTSSLHVYDGK

SEQ ID NO: 4902 - protein, 14 aa, Artificial sequence
  synthetic peptide
QTGTSSLHVYDGKF

SEQ ID NO: 4903 - protein, 14 aa, Artificial sequence
  synthetic peptide
TGTSSLHVYDGKFL

SEQ ID NO: 4904 - protein, 14 aa, Artificial sequence
  synthetic peptide
GTSSLHVYDGKFLA

SEQ ID NO: 4905 - protein, 14 aa, Artificial sequence
  synthetic peptide
TSSLHVYDGKFLAR

SEQ ID NO: 4906 - protein, 14 aa, Artificial sequence
  synthetic peptide
SSLHVYDGKFLARV

SEQ ID NO: 4907 - protein, 14 aa, Artificial sequence
  synthetic peptide
SLHVYDGKFLARVE

SEQ ID NO: 4908 - protein, 14 aa, Artificial sequence
  synthetic peptide
LHVYDGKFLARVER

SEQ ID NO: 4909 - protein, 14 aa, Artificial sequence
  synthetic peptide
HVYDGKFLARVERV

SEQ ID NO: 4910 - protein, 14 aa, Artificial sequence
  synthetic peptide
VYDGKFLARVERVI

SEQ ID NO: 4911 - protein, 14 aa, Artificial sequence
  synthetic peptide
YDGKFLARVERVIV

SEQ ID NO: 4912 - protein, 14 aa, Artificial sequence
  synthetic peptide
DGKFLARVERVIVV

SEQ ID NO: 4913 - protein, 14 aa, Artificial sequence
  synthetic peptide
GKFLARVERVIVVS

SEQ ID NO: 4914 - protein, 14 aa, Artificial sequence
  synthetic peptide
KFLARVERVIVVSM

SEQ ID NO: 4915 - protein, 14 aa, Artificial sequence
  synthetic peptide
FLARVERVIVVSMN

SEQ ID NO: 4916 - protein, 14 aa, Artificial sequence
  synthetic peptide
LARVERVIVVSMNY

SEQ ID NO: 4917 - protein, 14 aa, Artificial sequence
  synthetic peptide
ARVERVIVVSMNYR

SEQ ID NO: 4918 - protein, 14 aa, Artificial sequence
  synthetic peptide
RVERVIVVSMNYRV

SEQ ID NO: 4919 - protein, 14 aa, Artificial sequence
  synthetic peptide
VERVIVVSMNYRVG

SEQ ID NO: 4920 - protein, 14 aa, Artificial sequence
  synthetic peptide
ERVIVVSMNYRVGA

SEQ ID NO: 4921 - protein, 14 aa, Artificial sequence
  synthetic peptide
RVIVVSMNYRVGAL

SEQ ID NO: 4922 - protein, 14 aa, Artificial sequence
  synthetic peptide
VIVVSMNYRVGALG

SEQ ID NO: 4923 - protein, 14 aa, Artificial sequence
  synthetic peptide
IVVSMNYRVGALGF

SEQ ID NO: 4924 - protein, 14 aa, Artificial sequence
  synthetic peptide
VVSMNYRVGALGFL

SEQ ID NO: 4925 - protein, 14 aa, Artificial sequence
  synthetic peptide
VSMNYRVGALGFLA

SEQ ID NO: 4926 - protein, 14 aa, Artificial sequence
  synthetic peptide
SMNYRVGALGFLAL

SEQ ID NO: 4927 - protein, 14 aa, Artificial sequence
  synthetic peptide
MNYRVGALGFLALP

SEQ ID NO: 4928 - protein, 14 aa, Artificial sequence
  synthetic peptide
NYRVGALGFLALPG

SEQ ID NO: 4929 - protein, 14 aa, Artificial sequence
  synthetic peptide
YRVGALGFLALPGN

SEQ ID NO: 4930 - protein, 14 aa, Artificial sequence
  synthetic peptide
RVGALGFLALPGNP

SEQ ID NO: 4931 - protein, 14 aa, Artificial sequence
  synthetic peptide
VGALGFLALPGNPE

SEQ ID NO: 4932 - protein, 14 aa, Artificial sequence
  synthetic peptide
GALGFLALPGNPEA

SEQ ID NO: 4933 - protein, 14 aa, Artificial sequence
  synthetic peptide
ALGFLALPGNPEAP

SEQ ID NO: 4934 - protein, 14 aa, Artificial sequence
  synthetic peptide
LGFLALPGNPEAPG

SEQ ID NO: 4935 - protein, 14 aa, Artificial sequence
  synthetic peptide
GFLALPGNPEAPGN

SEQ ID NO: 4936 - protein, 14 aa, Artificial sequence
  synthetic peptide
FLALPGNPEAPGNM

SEQ ID NO: 4937 - protein, 14 aa, Artificial sequence
  synthetic peptide
LALPGNPEAPGNMG

SEQ ID NO: 4938 - protein, 14 aa, Artificial sequence
  synthetic peptide
ALPGNPEAPGNMGL

SEQ ID NO: 4939 - protein, 14 aa, Artificial sequence
  synthetic peptide
LPGNPEAPGNMGLF

SEQ ID NO: 4940 - protein, 14 aa, Artificial sequence
  synthetic peptide
PGNPEAPGNMGLFD

SEQ ID NO: 4941 - protein, 14 aa, Artificial sequence
  synthetic peptide
GNPEAPGNMGLFDQ

SEQ ID NO: 4942 - protein, 14 aa, Artificial sequence
  synthetic peptide
NPEAPGNMGLFDQQ

SEQ ID NO: 4943 - protein, 14 aa, Artificial sequence
  synthetic peptide
PEAPGNMGLFDQQL

SEQ ID NO: 4944 - protein, 14 aa, Artificial sequence
  synthetic peptide
EAPGNMGLFDQQLA

SEQ ID NO: 4945 - protein, 14 aa, Artificial sequence
  synthetic peptide
APGNMGLFDQQLAL

SEQ ID NO: 4946 - protein, 14 aa, Artificial sequence
  synthetic peptide
PGNMGLFDQQLALQ

SEQ ID NO: 4947 - protein, 14 aa, Artificial sequence
  synthetic peptide
GNMGLFDQQLALQW

SEQ ID NO: 4948 - protein, 14 aa, Artificial sequence
  synthetic peptide
NMGLFDQQLALQWV

SEQ ID NO: 4949 - protein, 14 aa, Artificial sequence
  synthetic peptide
MGLFDQQLALQWVQ

SEQ ID NO: 4950 - protein, 14 aa, Artificial sequence
  synthetic peptide
GLFDQQLALQWVQK

SEQ ID NO: 4951 - protein, 14 aa, Artificial sequence
  synthetic peptide
LFDQQLALQWVQKN

SEQ ID NO: 4952 - protein, 14 aa, Artificial sequence
  synthetic peptide
FDQQLALQWVQKNI

SEQ ID NO: 4953 - protein, 14 aa, Artificial sequence
  synthetic peptide
DQQLALQWVQKNIA

SEQ ID NO: 4954 - protein, 14 aa, Artificial sequence
  synthetic peptide
QQLALQWVQKNIAA

SEQ ID NO: 4955 - protein, 14 aa, Artificial sequence
  synthetic peptide
QLALQWVQKNIAAF

SEQ ID NO: 4956 - protein, 14 aa, Artificial sequence
  synthetic peptide
LALQWVQKNIAAFG

SEQ ID NO: 4957 - protein, 14 aa, Artificial sequence
  synthetic peptide
ALQWVQKNIAAFGG

SEQ ID NO: 4958 - protein, 14 aa, Artificial sequence
  synthetic peptide
LQWVQKNIAAFGGN

SEQ ID NO: 4959 - protein, 14 aa, Artificial sequence
  synthetic peptide
QWVQKNIAAFGGNP

SEQ ID NO: 4960 - protein, 14 aa, Artificial sequence
  synthetic peptide
WVQKNIAAFGGNPK

SEQ ID NO: 4961 - protein, 14 aa, Artificial sequence
  synthetic peptide
VQKNIAAFGGNPKS

SEQ ID NO: 4962 - protein, 14 aa, Artificial sequence
  synthetic peptide
QKNIAAFGGNPKSV

SEQ ID NO: 4963 - protein, 14 aa, Artificial sequence
  synthetic peptide
KNIAAFGGNPKSVT

SEQ ID NO: 4964 - protein, 14 aa, Artificial sequence
  synthetic peptide
NIAAFGGNPKSVTL

SEQ ID NO: 4965 - protein, 14 aa, Artificial sequence
  synthetic peptide
IAAFGGNPKSVTLF

SEQ ID NO: 4966 - protein, 14 aa, Artificial sequence
  synthetic peptide
AAFGGNPKSVTLFG

SEQ ID NO: 4967 - protein, 14 aa, Artificial sequence
  synthetic peptide
AFGGNPKSVTLFGE

SEQ ID NO: 4968 - protein, 14 aa, Artificial sequence
  synthetic peptide
FGGNPKSVTLFGES

SEQ ID NO: 4969 - protein, 14 aa, Artificial sequence
  synthetic peptide
GGNPKSVTLFGESA

SEQ ID NO: 4970 - protein, 14 aa, Artificial sequence
  synthetic peptide
GNPKSVTLFGESAG

SEQ ID NO: 4971 - protein, 14 aa, Artificial sequence
  synthetic peptide
NPKSVTLFGESAGA

SEQ ID NO: 4972 - protein, 14 aa, Artificial sequence
  synthetic peptide
PKSVTLFGESAGAA

SEQ ID NO: 4973 - protein, 14 aa, Artificial sequence
  synthetic peptide
KSVTLFGESAGAAS

SEQ ID NO: 4974 - protein, 14 aa, Artificial sequence
  synthetic peptide
SVTLFGESAGAASV

SEQ ID NO: 4975 - protein, 14 aa, Artificial sequence
  synthetic peptide
VTLFGESAGAASVS

SEQ ID NO: 4976 - protein, 14 aa, Artificial sequence
  synthetic peptide
TLFGESAGAASVSL

SEQ ID NO: 4977 - protein, 14 aa, Artificial sequence
  synthetic peptide
LFGESAGAASVSLH

SEQ ID NO: 4978 - protein, 14 aa, Artificial sequence
  synthetic peptide
FGESAGAASVSLHL

SEQ ID NO: 4979 - protein, 14 aa, Artificial sequence
  synthetic peptide
GESAGAASVSLHLL

SEQ ID NO: 4980 - protein, 14 aa, Artificial sequence
  synthetic peptide
ESAGAASVSLHLLS

SEQ ID NO: 4981 - protein, 14 aa, Artificial sequence
  synthetic peptide
SAGAASVSLHLLSP

SEQ ID NO: 4982 - protein, 14 aa, Artificial sequence
  synthetic peptide
AGAASVSLHLLSPG

SEQ ID NO: 4983 - protein, 14 aa, Artificial sequence
  synthetic peptide
GAASVSLHLLSPGS

SEQ ID NO: 4984 - protein, 14 aa, Artificial sequence
  synthetic peptide
AASVSLHLLSPGSH

SEQ ID NO: 4985 - protein, 14 aa, Artificial sequence
  synthetic peptide
ASVSLHLLSPGSHS

SEQ ID NO: 4986 - protein, 14 aa, Artificial sequence
  synthetic peptide
SVSLHLLSPGSHSL

SEQ ID NO: 4987 - protein, 14 aa, Artificial sequence
  synthetic peptide
VSLHLLSPGSHSLF

SEQ ID NO: 4988 - protein, 14 aa, Artificial sequence
  synthetic peptide
SLHLLSPGSHSLFT

SEQ ID NO: 4989 - protein, 14 aa, Artificial sequence
  synthetic peptide
LHLLSPGSHSLFTR

SEQ ID NO: 4990 - protein, 14 aa, Artificial sequence
  synthetic peptide
HLLSPGSHSLFTRA

SEQ ID NO: 4991 - protein, 14 aa, Artificial sequence
  synthetic peptide
LLSPGSHSLFTRAI

SEQ ID NO: 4992 - protein, 14 aa, Artificial sequence
  synthetic peptide
LSPGSHSLFTRAIL

SEQ ID NO: 4993 - protein, 14 aa, Artificial sequence
  synthetic peptide
SPGSHSLFTRAILQ

SEQ ID NO: 4994 - protein, 14 aa, Artificial sequence
  synthetic peptide
PGSHSLFTRAILQS

SEQ ID NO: 4995 - protein, 14 aa, Artificial sequence
  synthetic peptide
GSHSLFTRAILQSG

SEQ ID NO: 4996 - protein, 14 aa, Artificial sequence
  synthetic peptide
SHSLFTRAILQSGS

SEQ ID NO: 4997 - protein, 14 aa, Artificial sequence
  synthetic peptide
HSLFTRAILQSGSF

SEQ ID NO: 4998 - protein, 14 aa, Artificial sequence
  synthetic peptide
SLFTRAILQSGSFN

SEQ ID NO: 4999 - protein, 14 aa, Artificial sequence
  synthetic peptide
LFTRAILQSGSFNA

SEQ ID NO: 5000 - protein, 14 aa, Artificial sequence
  synthetic peptide
FTRAILQSGSFNAP

SEQ ID NO: 5001 - protein, 14 aa, Artificial sequence
  synthetic peptide
TRAILQSGSFNAPW

SEQ ID NO: 5002 - protein, 14 aa, Artificial sequence
  synthetic peptide
RAILQSGSFNAPWA

SEQ ID NO: 5003 - protein, 14 aa, Artificial sequence
  synthetic peptide
AILQSGSFNAPWAV

SEQ ID NO: 5004 - protein, 14 aa, Artificial sequence
  synthetic peptide
ILQSGSFNAPWAVT

SEQ ID NO: 5005 - protein, 14 aa, Artificial sequence
  synthetic peptide
LQSGSFNAPWAVTS

SEQ ID NO: 5006 - protein, 14 aa, Artificial sequence
  synthetic peptide
QSGSFNAPWAVTSL

SEQ ID NO: 5007 - protein, 14 aa, Artificial sequence
  synthetic peptide
SGSFNAPWAVTSLY

SEQ ID NO: 5008 - protein, 14 aa, Artificial sequence
  synthetic peptide
GSFNAPWAVTSLYE

SEQ ID NO: 5009 - protein, 14 aa, Artificial sequence
  synthetic peptide
SFNAPWAVTSLYEA

SEQ ID NO: 5010 - protein, 14 aa, Artificial sequence
  synthetic peptide
FNAPWAVTSLYEAR

SEQ ID NO: 5011 - protein, 14 aa, Artificial sequence
  synthetic peptide
NAPWAVTSLYEARN

SEQ ID NO: 5012 - protein, 14 aa, Artificial sequence
  synthetic peptide
APWAVTSLYEARNR

SEQ ID NO: 5013 - protein, 14 aa, Artificial sequence
  synthetic peptide
PWAVTSLYEARNRT

SEQ ID NO: 5014 - protein, 14 aa, Artificial sequence
  synthetic peptide
WAVTSLYEARNRTL

SEQ ID NO: 5015 - protein, 14 aa, Artificial sequence
  synthetic peptide
AVTSLYEARNRTLN

SEQ ID NO: 5016 - protein, 14 aa, Artificial sequence
  synthetic peptide
VTSLYEARNRTLNL

SEQ ID NO: 5017 - protein, 14 aa, Artificial sequence
  synthetic peptide
TSLYEARNRTLNLA

SEQ ID NO: 5018 - protein, 14 aa, Artificial sequence
  synthetic peptide
SLYEARNRTLNLAK

SEQ ID NO: 5019 - protein, 14 aa, Artificial sequence
  synthetic peptide
LYEARNRTLNLAKL

SEQ ID NO: 5020 - protein, 14 aa, Artificial sequence
  synthetic peptide
YEARNRTLNLAKLT

SEQ ID NO: 5021 - protein, 14 aa, Artificial sequence
  synthetic peptide
EARNRTLNLAKLTG

SEQ ID NO: 5022 - protein, 14 aa, Artificial sequence
  synthetic peptide
ARNRTLNLAKLTGC

SEQ ID NO: 5023 - protein, 14 aa, Artificial sequence
  synthetic peptide
RNRTLNLAKLTGCS

SEQ ID NO: 5024 - protein, 14 aa, Artificial sequence
  synthetic peptide
NRTLNLAKLTGCSR

SEQ ID NO: 5025 - protein, 14 aa, Artificial sequence
  synthetic peptide
RTLNLAKLTGCSRE

SEQ ID NO: 5026 - protein, 14 aa, Artificial sequence
  synthetic peptide
TLNLAKLTGCSREN

SEQ ID NO: 5027 - protein, 14 aa, Artificial sequence
  synthetic peptide
LNLAKLTGCSRENE

SEQ ID NO: 5028 - protein, 14 aa, Artificial sequence
  synthetic peptide
NLAKLTGCSRENET

SEQ ID NO: 5029 - protein, 14 aa, Artificial sequence
  synthetic peptide
LAKLTGCSRENETE

SEQ ID NO: 5030 - protein, 14 aa, Artificial sequence
  synthetic peptide
AKLTGCSRENETEI

SEQ ID NO: 5031 - protein, 14 aa, Artificial sequence
  synthetic peptide
KLTGCSRENETEII

SEQ ID NO: 5032 - protein, 14 aa, Artificial sequence
  synthetic peptide
LTGCSRENETEIIK

SEQ ID NO: 5033 - protein, 14 aa, Artificial sequence
  synthetic peptide
TGCSRENETEIIKC

SEQ ID NO: 5034 - protein, 14 aa, Artificial sequence
  synthetic peptide
GCSRENETEIIKCL

SEQ ID NO: 5035 - protein, 14 aa, Artificial sequence
  synthetic peptide
CSRENETEIIKCLR

SEQ ID NO: 5036 - protein, 14 aa, Artificial sequence
  synthetic peptide
SRENETEIIKCLRN

SEQ ID NO: 5037 - protein, 14 aa, Artificial sequence
  synthetic peptide
RENETEIIKCLRNK

SEQ ID NO: 5038 - protein, 14 aa, Artificial sequence
  synthetic peptide
ENETEIIKCLRNKD

SEQ ID NO: 5039 - protein, 14 aa, Artificial sequence
  synthetic peptide
NETEIIKCLRNKDP

SEQ ID NO: 5040 - protein, 14 aa, Artificial sequence
  synthetic peptide
ETEIIKCLRNKDPQ

SEQ ID NO: 5041 - protein, 14 aa, Artificial sequence
  synthetic peptide
TEIIKCLRNKDPQE

SEQ ID NO: 5042 - protein, 14 aa, Artificial sequence
  synthetic peptide
EIIKCLRNKDPQEI

SEQ ID NO: 5043 - protein, 14 aa, Artificial sequence
  synthetic peptide
IIKCLRNKDPQEIL

SEQ ID NO: 5044 - protein, 14 aa, Artificial sequence
  synthetic peptide
IKCLRNKDPQEILL

SEQ ID NO: 5045 - protein, 14 aa, Artificial sequence
  synthetic peptide
KCLRNKDPQEILLN

SEQ ID NO: 5046 - protein, 14 aa, Artificial sequence
  synthetic peptide
CLRNKDPQEILLNE

SEQ ID NO: 5047 - protein, 14 aa, Artificial sequence
  synthetic peptide
LRNKDPQEILLNEA

SEQ ID NO: 5048 - protein, 14 aa, Artificial sequence
  synthetic peptide
RNKDPQEILLNEAF

SEQ ID NO: 5049 - protein, 14 aa, Artificial sequence
  synthetic peptide
NKDPQEILLNEAFV

SEQ ID NO: 5050 - protein, 14 aa, Artificial sequence
  synthetic peptide
KDPQEILLNEAFVV

SEQ ID NO: 5051 - protein, 14 aa, Artificial sequence
  synthetic peptide
DPQEILLNEAFVVP

SEQ ID NO: 5052 - protein, 14 aa, Artificial sequence
  synthetic peptide
PQEILLNEAFVVPY

SEQ ID NO: 5053 - protein, 14 aa, Artificial sequence
  synthetic peptide
QEILLNEAFVVPYG

SEQ ID NO: 5054 - protein, 14 aa, Artificial sequence
  synthetic peptide
EILLNEAFVVPYGT

SEQ ID NO: 5055 - protein, 14 aa, Artificial sequence
  synthetic peptide
ILLNEAFVVPYGTP

SEQ ID NO: 5056 - protein, 14 aa, Artificial sequence
  synthetic peptide
LLNEAFVVPYGTPL

SEQ ID NO: 5057 - protein, 14 aa, Artificial sequence
  synthetic peptide
LNEAFVVPYGTPLS

SEQ ID NO: 5058 - protein, 14 aa, Artificial sequence
  synthetic peptide
NEAFVVPYGTPLSV

SEQ ID NO: 5059 - protein, 14 aa, Artificial sequence
  synthetic peptide
EAFVVPYGTPLSVN

SEQ ID NO: 5060 - protein, 14 aa, Artificial sequence
  synthetic peptide
AFVVPYGTPLSVNF

SEQ ID NO: 5061 - protein, 14 aa, Artificial sequence
  synthetic peptide
FVVPYGTPLSVNFG

SEQ ID NO: 5062 - protein, 14 aa, Artificial sequence
  synthetic peptide
VVPYGTPLSVNFGP

SEQ ID NO: 5063 - protein, 14 aa, Artificial sequence
  synthetic peptide
VPYGTPLSVNFGPT

SEQ ID NO: 5064 - protein, 14 aa, Artificial sequence
  synthetic peptide
PYGTPLSVNFGPTV

SEQ ID NO: 5065 - protein, 14 aa, Artificial sequence
  synthetic peptide
YGTPLSVNFGPTVD

SEQ ID NO: 5066 - protein, 14 aa, Artificial sequence
  synthetic peptide
GTPLSVNFGPTVDG

SEQ ID NO: 5067 - protein, 14 aa, Artificial sequence
  synthetic peptide
TPLSVNFGPTVDGD

SEQ ID NO: 5068 - protein, 14 aa, Artificial sequence
  synthetic peptide
PLSVNFGPTVDGDF

SEQ ID NO: 5069 - protein, 14 aa, Artificial sequence
  synthetic peptide
LSVNFGPTVDGDFL

SEQ ID NO: 5070 - protein, 14 aa, Artificial sequence
  synthetic peptide
SVNFGPTVDGDFLT

SEQ ID NO: 5071 - protein, 14 aa, Artificial sequence
  synthetic peptide
VNFGPTVDGDFLTD

SEQ ID NO: 5072 - protein, 14 aa, Artificial sequence
  synthetic peptide
NFGPTVDGDFLTDM

SEQ ID NO: 5073 - protein, 14 aa, Artificial sequence
  synthetic peptide
FGPTVDGDFLTDMP

SEQ ID NO: 5074 - protein, 14 aa, Artificial sequence
  synthetic peptide
GPTVDGDFLTDMPD

SEQ ID NO: 5075 - protein, 14 aa, Artificial sequence
  synthetic peptide
PTVDGDFLTDMPDI

SEQ ID NO: 5076 - protein, 14 aa, Artificial sequence
  synthetic peptide
TVDGDFLTDMPDIL

SEQ ID NO: 5077 - protein, 14 aa, Artificial sequence
  synthetic peptide
VDGDFLTDMPDILL

SEQ ID NO: 5078 - protein, 14 aa, Artificial sequence
  synthetic peptide
DGDFLTDMPDILLE

SEQ ID NO: 5079 - protein, 14 aa, Artificial sequence
  synthetic peptide
GDFLTDMPDILLEL

SEQ ID NO: 5080 - protein, 14 aa, Artificial sequence
  synthetic peptide
DFLTDMPDILLELG

SEQ ID NO: 5081 - protein, 14 aa, Artificial sequence
  synthetic peptide
FLTDMPDILLELGQ

SEQ ID NO: 5082 - protein, 14 aa, Artificial sequence
  synthetic peptide
LTDMPDILLELGQF

SEQ ID NO: 5083 - protein, 14 aa, Artificial sequence
  synthetic peptide
TDMPDILLELGQFK

SEQ ID NO: 5084 - protein, 14 aa, Artificial sequence
  synthetic peptide
DMPDILLELGQFKK

SEQ ID NO: 5085 - protein, 14 aa, Artificial sequence
  synthetic peptide
MPDILLELGQFKKT

SEQ ID NO: 5086 - protein, 14 aa, Artificial sequence
  synthetic peptide
PDILLELGQFKKTQ

SEQ ID NO: 5087 - protein, 14 aa, Artificial sequence
  synthetic peptide
DILLELGQFKKTQI

SEQ ID NO: 5088 - protein, 14 aa, Artificial sequence
  synthetic peptide
ILLELGQFKKTQIL

SEQ ID NO: 5089 - protein, 14 aa, Artificial sequence
  synthetic peptide
LLELGQFKKTQILV

SEQ ID NO: 5090 - protein, 14 aa, Artificial sequence
  synthetic peptide
LELGQFKKTQILVG

SEQ ID NO: 5091 - protein, 14 aa, Artificial sequence
  synthetic peptide
ELGQFKKTQILVGV

SEQ ID NO: 5092 - protein, 14 aa, Artificial sequence
  synthetic peptide
LGQFKKTQILVGVN

SEQ ID NO: 5093 - protein, 14 aa, Artificial sequence
  synthetic peptide
GQFKKTQILVGVNK

SEQ ID NO: 5094 - protein, 14 aa, Artificial sequence
  synthetic peptide
QFKKTQILVGVNKD

SEQ ID NO: 5095 - protein, 14 aa, Artificial sequence
  synthetic peptide
FKKTQILVGVNKDE

SEQ ID NO: 5096 - protein, 14 aa, Artificial sequence
  synthetic peptide
KKTQILVGVNKDEG

SEQ ID NO: 5097 - protein, 14 aa, Artificial sequence
  synthetic peptide
KTQILVGVNKDEGT

SEQ ID NO: 5098 - protein, 14 aa, Artificial sequence
  synthetic peptide
TQILVGVNKDEGTA

SEQ ID NO: 5099 - protein, 14 aa, Artificial sequence
  synthetic peptide
QILVGVNKDEGTAF

SEQ ID NO: 5100 - protein, 14 aa, Artificial sequence
  synthetic peptide
ILVGVNKDEGTAFL

SEQ ID NO: 5101 - protein, 14 aa, Artificial sequence
  synthetic peptide
LVGVNKDEGTAFLV

SEQ ID NO: 5102 - protein, 14 aa, Artificial sequence
  synthetic peptide
VGVNKDEGTAFLVY

SEQ ID NO: 5103 - protein, 14 aa, Artificial sequence
  synthetic peptide
GVNKDEGTAFLVYG

SEQ ID NO: 5104 - protein, 14 aa, Artificial sequence
  synthetic peptide
VNKDEGTAFLVYGA

SEQ ID NO: 5105 - protein, 14 aa, Artificial sequence
  synthetic peptide
NKDEGTAFLVYGAP

SEQ ID NO: 5106 - protein, 14 aa, Artificial sequence
  synthetic peptide
KDEGTAFLVYGAPG

SEQ ID NO: 5107 - protein, 14 aa, Artificial sequence
  synthetic peptide
DEGTAFLVYGAPGF

SEQ ID NO: 5108 - protein, 14 aa, Artificial sequence
  synthetic peptide
EGTAFLVYGAPGFS

SEQ ID NO: 5109 - protein, 14 aa, Artificial sequence
  synthetic peptide
GTAFLVYGAPGFSK

SEQ ID NO: 5110 - protein, 14 aa, Artificial sequence
  synthetic peptide
TAFLVYGAPGFSKD

SEQ ID NO: 5111 - protein, 14 aa, Artificial sequence
  synthetic peptide
AFLVYGAPGFSKDN

SEQ ID NO: 5112 - protein, 14 aa, Artificial sequence
  synthetic peptide
FLVYGAPGFSKDNN

SEQ ID NO: 5113 - protein, 14 aa, Artificial sequence
  synthetic peptide
LVYGAPGFSKDNNS

SEQ ID NO: 5114 - protein, 14 aa, Artificial sequence
  synthetic peptide
VYGAPGFSKDNNSI

SEQ ID NO: 5115 - protein, 14 aa, Artificial sequence
  synthetic peptide
YGAPGFSKDNNSII

SEQ ID NO: 5116 - protein, 14 aa, Artificial sequence
  synthetic peptide
GAPGFSKDNNSIIT

SEQ ID NO: 5117 - protein, 14 aa, Artificial sequence
  synthetic peptide
APGFSKDNNSIITR

SEQ ID NO: 5118 - protein, 14 aa, Artificial sequence
  synthetic peptide
PGFSKDNNSIITRK

SEQ ID NO: 5119 - protein, 14 aa, Artificial sequence
  synthetic peptide
GFSKDNNSIITRKE

SEQ ID NO: 5120 - protein, 14 aa, Artificial sequence
  synthetic peptide
FSKDNNSIITRKEF

SEQ ID NO: 5121 - protein, 14 aa, Artificial sequence
  synthetic peptide
SKDNNSIITRKEFQ

SEQ ID NO: 5122 - protein, 14 aa, Artificial sequence
  synthetic peptide
KDNNSIITRKEFQE

SEQ ID NO: 5123 - protein, 14 aa, Artificial sequence
  synthetic peptide
DNNSIITRKEFQEG

SEQ ID NO: 5124 - protein, 14 aa, Artificial sequence
  synthetic peptide
NNSIITRKEFQEGL

SEQ ID NO: 5125 - protein, 14 aa, Artificial sequence
  synthetic peptide
NSIITRKEFQEGLK

SEQ ID NO: 5126 - protein, 14 aa, Artificial sequence
  synthetic peptide
SIITRKEFQEGLKI

SEQ ID NO: 5127 - protein, 14 aa, Artificial sequence
  synthetic peptide
IITRKEFQEGLKIF

SEQ ID NO: 5128 - protein, 14 aa, Artificial sequence
  synthetic peptide
ITRKEFQEGLKIFF

SEQ ID NO: 5129 - protein, 14 aa, Artificial sequence
  synthetic peptide
TRKEFQEGLKIFFP

SEQ ID NO: 5130 - protein, 14 aa, Artificial sequence
  synthetic peptide
RKEFQEGLKIFFPG

SEQ ID NO: 5131 - protein, 14 aa, Artificial sequence
  synthetic peptide
KEFQEGLKIFFPGV

SEQ ID NO: 5132 - protein, 14 aa, Artificial sequence
  synthetic peptide
EFQEGLKIFFPGVS

SEQ ID NO: 5133 - protein, 14 aa, Artificial sequence
  synthetic peptide
FQEGLKIFFPGVSE

SEQ ID NO: 5134 - protein, 14 aa, Artificial sequence
  synthetic peptide
QEGLKIFFPGVSEF

SEQ ID NO: 5135 - protein, 14 aa, Artificial sequence
  synthetic peptide
EGLKIFFPGVSEFG

SEQ ID NO: 5136 - protein, 14 aa, Artificial sequence
  synthetic peptide
GLKIFFPGVSEFGK

SEQ ID NO: 5137 - protein, 14 aa, Artificial sequence
  synthetic peptide
LKIFFPGVSEFGKE

SEQ ID NO: 5138 - protein, 14 aa, Artificial sequence
  synthetic peptide
KIFFPGVSEFGKES

SEQ ID NO: 5139 - protein, 14 aa, Artificial sequence
  synthetic peptide
IFFPGVSEFGKESI

SEQ ID NO: 5140 - protein, 14 aa, Artificial sequence
  synthetic peptide
FFPGVSEFGKESIL

SEQ ID NO: 5141 - protein, 14 aa, Artificial sequence
  synthetic peptide
FPGVSEFGKESILF

SEQ ID NO: 5142 - protein, 14 aa, Artificial sequence
  synthetic peptide
PGVSEFGKESILFH

SEQ ID NO: 5143 - protein, 14 aa, Artificial sequence
  synthetic peptide
GVSEFGKESILFHY

SEQ ID NO: 5144 - protein, 14 aa, Artificial sequence
  synthetic peptide
VSEFGKESILFHYT

SEQ ID NO: 5145 - protein, 14 aa, Artificial sequence
  synthetic peptide
SEFGKESILFHYTD

SEQ ID NO: 5146 - protein, 14 aa, Artificial sequence
  synthetic peptide
EFGKESILFHYTDW

SEQ ID NO: 5147 - protein, 14 aa, Artificial sequence
  synthetic peptide
FGKESILFHYTDWV

SEQ ID NO: 5148 - protein, 14 aa, Artificial sequence
  synthetic peptide
GKESILFHYTDWVD

SEQ ID NO: 5149 - protein, 14 aa, Artificial sequence
  synthetic peptide
KESILFHYTDWVDD

SEQ ID NO: 5150 - protein, 14 aa, Artificial sequence
  synthetic peptide
ESILFHYTDWVDDQ

SEQ ID NO: 5151 - protein, 14 aa, Artificial sequence
  synthetic peptide
SILFHYTDWVDDQR

SEQ ID NO: 5152 - protein, 14 aa, Artificial sequence
  synthetic peptide
ILFHYTDWVDDQRP

SEQ ID NO: 5153 - protein, 14 aa, Artificial sequence
  synthetic peptide
LFHYTDWVDDQRPE

SEQ ID NO: 5154 - protein, 14 aa, Artificial sequence
  synthetic peptide
FHYTDWVDDQRPEN

SEQ ID NO: 5155 - protein, 14 aa, Artificial sequence
  synthetic peptide
HYTDWVDDQRPENY

SEQ ID NO: 5156 - protein, 14 aa, Artificial sequence
  synthetic peptide
YTDWVDDQRPENYR

SEQ ID NO: 5157 - protein, 14 aa, Artificial sequence
  synthetic peptide
TDWVDDQRPENYRE

SEQ ID NO: 5158 - protein, 14 aa, Artificial sequence
  synthetic peptide
DWVDDQRPENYREA

SEQ ID NO: 5159 - protein, 14 aa, Artificial sequence
  synthetic peptide
WVDDQRPENYREAL

SEQ ID NO: 5160 - protein, 14 aa, Artificial sequence
  synthetic peptide
VDDQRPENYREALG

SEQ ID NO: 5161 - protein, 14 aa, Artificial sequence
  synthetic peptide
DDQRPENYREALGD

SEQ ID NO: 5162 - protein, 14 aa, Artificial sequence
  synthetic peptide
DQRPENYREALGDV

SEQ ID NO: 5163 - protein, 14 aa, Artificial sequence
  synthetic peptide
QRPENYREALGDVV

SEQ ID NO: 5164 - protein, 14 aa, Artificial sequence
  synthetic peptide
RPENYREALGDVVG

SEQ ID NO: 5165 - protein, 14 aa, Artificial sequence
  synthetic peptide
PENYREALGDVVGD

SEQ ID NO: 5166 - protein, 14 aa, Artificial sequence
  synthetic peptide
ENYREALGDVVGDY

SEQ ID NO: 5167 - protein, 14 aa, Artificial sequence
  synthetic peptide
NYREALGDVVGDYN

SEQ ID NO: 5168 - protein, 14 aa, Artificial sequence
  synthetic peptide
YREALGDVVGDYNF

SEQ ID NO: 5169 - protein, 14 aa, Artificial sequence
  synthetic peptide
REALGDVVGDYNFI

SEQ ID NO: 5170 - protein, 14 aa, Artificial sequence
  synthetic peptide
EALGDVVGDYNFIC

SEQ ID NO: 5171 - protein, 14 aa, Artificial sequence
  synthetic peptide
ALGDVVGDYNFICP

SEQ ID NO: 5172 - protein, 14 aa, Artificial sequence
  synthetic peptide
LGDVVGDYNFICPA

SEQ ID NO: 5173 - protein, 14 aa, Artificial sequence
  synthetic peptide
GDVVGDYNFICPAL

SEQ ID NO: 5174 - protein, 14 aa, Artificial sequence
  synthetic peptide
DVVGDYNFICPALE

SEQ ID NO: 5175 - protein, 14 aa, Artificial sequence
  synthetic peptide
VVGDYNFICPALEF

SEQ ID NO: 5176 - protein, 14 aa, Artificial sequence
  synthetic peptide
VGDYNFICPALEFT

SEQ ID NO: 5177 - protein, 14 aa, Artificial sequence
  synthetic peptide
GDYNFICPALEFTK

SEQ ID NO: 5178 - protein, 14 aa, Artificial sequence
  synthetic peptide
DYNFICPALEFTKK

SEQ ID NO: 5179 - protein, 14 aa, Artificial sequence
  synthetic peptide
YNFICPALEFTKKF

SEQ ID NO: 5180 - protein, 14 aa, Artificial sequence
  synthetic peptide
NFICPALEFTKKFS

SEQ ID NO: 5181 - protein, 14 aa, Artificial sequence
  synthetic peptide
FICPALEFTKKFSE

SEQ ID NO: 5182 - protein, 14 aa, Artificial sequence
  synthetic peptide
ICPALEFTKKFSEW

SEQ ID NO: 5183 - protein, 14 aa, Artificial sequence
  synthetic peptide
CPALEFTKKFSEWG

SEQ ID NO: 5184 - protein, 14 aa, Artificial sequence
  synthetic peptide
PALEFTKKFSEWGN

SEQ ID NO: 5185 - protein, 14 aa, Artificial sequence
  synthetic peptide
ALEFTKKFSEWGNN

SEQ ID NO: 5186 - protein, 14 aa, Artificial sequence
  synthetic peptide
LEFTKKFSEWGNNA

SEQ ID NO: 5187 - protein, 14 aa, Artificial sequence
  synthetic peptide
EFTKKFSEWGNNAF

SEQ ID NO: 5188 - protein, 14 aa, Artificial sequence
  synthetic peptide
FTKKFSEWGNNAFF

SEQ ID NO: 5189 - protein, 14 aa, Artificial sequence
  synthetic peptide
TKKFSEWGNNAFFY

SEQ ID NO: 5190 - protein, 14 aa, Artificial sequence
  synthetic peptide
KKFSEWGNNAFFYY

SEQ ID NO: 5191 - protein, 14 aa, Artificial sequence
  synthetic peptide
KFSEWGNNAFFYYF

SEQ ID NO: 5192 - protein, 14 aa, Artificial sequence
  synthetic peptide
FSEWGNNAFFYYFE

SEQ ID NO: 5193 - protein, 14 aa, Artificial sequence
  synthetic peptide
SEWGNNAFFYYFEH

SEQ ID NO: 5194 - protein, 14 aa, Artificial sequence
  synthetic peptide
EWGNNAFFYYFEHR

SEQ ID NO: 5195 - protein, 14 aa, Artificial sequence
  synthetic peptide
WGNNAFFYYFEHRS

SEQ ID NO: 5196 - protein, 14 aa, Artificial sequence
  synthetic peptide
GNNAFFYYFEHRSS

SEQ ID NO: 5197 - protein, 14 aa, Artificial sequence
  synthetic peptide
NNAFFYYFEHRSSK

SEQ ID NO: 5198 - protein, 14 aa, Artificial sequence
  synthetic peptide
NAFFYYFEHRSSKL

SEQ ID NO: 5199 - protein, 14 aa, Artificial sequence
  synthetic peptide
AFFYYFEHRSSKLP

SEQ ID NO: 5200 - protein, 14 aa, Artificial sequence
  synthetic peptide
FFYYFEHRSSKLPW

SEQ ID NO: 5201 - protein, 14 aa, Artificial sequence
  synthetic peptide
FYYFEHRSSKLPWP

SEQ ID NO: 5202 - protein, 14 aa, Artificial sequence
  synthetic peptide
YYFEHRSSKLPWPE

SEQ ID NO: 5203 - protein, 14 aa, Artificial sequence
  synthetic peptide
YFEHRSSKLPWPEW

SEQ ID NO: 5204 - protein, 14 aa, Artificial sequence
  synthetic peptide
FEHRSSKLPWPEWM

SEQ ID NO: 5205 - protein, 14 aa, Artificial sequence
  synthetic peptide
EHRSSKLPWPEWMG

SEQ ID NO: 5206 - protein, 14 aa, Artificial sequence
  synthetic peptide
HRSSKLPWPEWMGV

SEQ ID NO: 5207 - protein, 14 aa, Artificial sequence
  synthetic peptide
RSSKLPWPEWMGVM

SEQ ID NO: 5208 - protein, 14 aa, Artificial sequence
  synthetic peptide
SSKLPWPEWMGVMH

SEQ ID NO: 5209 - protein, 14 aa, Artificial sequence
  synthetic peptide
SKLPWPEWMGVMHG

SEQ ID NO: 5210 - protein, 14 aa, Artificial sequence
  synthetic peptide
KLPWPEWMGVMHGY

SEQ ID NO: 5211 - protein, 14 aa, Artificial sequence
  synthetic peptide
LPWPEWMGVMHGYE

SEQ ID NO: 5212 - protein, 14 aa, Artificial sequence
  synthetic peptide
PWPEWMGVMHGYEI

SEQ ID NO: 5213 - protein, 14 aa, Artificial sequence
  synthetic peptide
WPEWMGVMHGYEIE

SEQ ID NO: 5214 - protein, 14 aa, Artificial sequence
  synthetic peptide
PEWMGVMHGYEIEF

SEQ ID NO: 5215 - protein, 14 aa, Artificial sequence
  synthetic peptide
EWMGVMHGYEIEFV

SEQ ID NO: 5216 - protein, 14 aa, Artificial sequence
  synthetic peptide
WMGVMHGYEIEFVF

SEQ ID NO: 5217 - protein, 14 aa, Artificial sequence
  synthetic peptide
MGVMHGYEIEFVFG

SEQ ID NO: 5218 - protein, 14 aa, Artificial sequence
  synthetic peptide
GVMHGYEIEFVFGL

SEQ ID NO: 5219 - protein, 14 aa, Artificial sequence
  synthetic peptide
VMHGYEIEFVFGLP

SEQ ID NO: 5220 - protein, 14 aa, Artificial sequence
  synthetic peptide
MHGYEIEFVFGLPL

SEQ ID NO: 5221 - protein, 14 aa, Artificial sequence
  synthetic peptide
HGYEIEFVFGLPLE

SEQ ID NO: 5222 - protein, 14 aa, Artificial sequence
  synthetic peptide
GYEIEFVFGLPLER

SEQ ID NO: 5223 - protein, 14 aa, Artificial sequence
  synthetic peptide
YEIEFVFGLPLERR

SEQ ID NO: 5224 - protein, 14 aa, Artificial sequence
  synthetic peptide
EIEFVFGLPLERRD

SEQ ID NO: 5225 - protein, 14 aa, Artificial sequence
  synthetic peptide
IEFVFGLPLERRDN

SEQ ID NO: 5226 - protein, 14 aa, Artificial sequence
  synthetic peptide
EFVFGLPLERRDNY

SEQ ID NO: 5227 - protein, 14 aa, Artificial sequence
  synthetic peptide
FVFGLPLERRDNYT

SEQ ID NO: 5228 - protein, 14 aa, Artificial sequence
  synthetic peptide
VFGLPLERRDNYTK

SEQ ID NO: 5229 - protein, 14 aa, Artificial sequence
  synthetic peptide
FGLPLERRDNYTKA

SEQ ID NO: 5230 - protein, 14 aa, Artificial sequence
  synthetic peptide
GLPLERRDNYTKAE

SEQ ID NO: 5231 - protein, 14 aa, Artificial sequence
  synthetic peptide
LPLERRDNYTKAEE

SEQ ID NO: 5232 - protein, 14 aa, Artificial sequence
  synthetic peptide
PLERRDNYTKAEEI

SEQ ID NO: 5233 - protein, 14 aa, Artificial sequence
  synthetic peptide
LERRDNYTKAEEIL

SEQ ID NO: 5234 - protein, 14 aa, Artificial sequence
  synthetic peptide
ERRDNYTKAEEILS

SEQ ID NO: 5235 - protein, 14 aa, Artificial sequence
  synthetic peptide
RRDNYTKAEEILSR

SEQ ID NO: 5236 - protein, 14 aa, Artificial sequence
  synthetic peptide
RDNYTKAEEILSRS

SEQ ID NO: 5237 - protein, 14 aa, Artificial sequence
  synthetic peptide
DNYTKAEEILSRSI

SEQ ID NO: 5238 - protein, 14 aa, Artificial sequence
  synthetic peptide
NYTKAEEILSRSIV

SEQ ID NO: 5239 - protein, 14 aa, Artificial sequence
  synthetic peptide
YTKAEEILSRSIVK

SEQ ID NO: 5240 - protein, 14 aa, Artificial sequence
  synthetic peptide
TKAEEILSRSIVKR

SEQ ID NO: 5241 - protein, 14 aa, Artificial sequence
  synthetic peptide
KAEEILSRSIVKRW

SEQ ID NO: 5242 - protein, 14 aa, Artificial sequence
  synthetic peptide
AEEILSRSIVKRWA

SEQ ID NO: 5243 - protein, 14 aa, Artificial sequence
  synthetic peptide
EEILSRSIVKRWAN

SEQ ID NO: 5244 - protein, 14 aa, Artificial sequence
  synthetic peptide
EILSRSIVKRWANF

SEQ ID NO: 5245 - protein, 14 aa, Artificial sequence
  synthetic peptide
ILSRSIVKRWANFA

SEQ ID NO: 5246 - protein, 14 aa, Artificial sequence
  synthetic peptide
LSRSIVKRWANFAK

SEQ ID NO: 5247 - protein, 14 aa, Artificial sequence
  synthetic peptide
SRSIVKRWANFAKY

SEQ ID NO: 5248 - protein, 14 aa, Artificial sequence
  synthetic peptide
RSIVKRWANFAKYG

SEQ ID NO: 5249 - protein, 14 aa, Artificial sequence
  synthetic peptide
SIVKRWANFAKYGN

SEQ ID NO: 5250 - protein, 14 aa, Artificial sequence
  synthetic peptide
IVKRWANFAKYGNP

SEQ ID NO: 5251 - protein, 14 aa, Artificial sequence
  synthetic peptide
VKRWANFAKYGNPN

SEQ ID NO: 5252 - protein, 14 aa, Artificial sequence
  synthetic peptide
KRWANFAKYGNPNE

SEQ ID NO: 5253 - protein, 14 aa, Artificial sequence
  synthetic peptide
RWANFAKYGNPNET

SEQ ID NO: 5254 - protein, 14 aa, Artificial sequence
  synthetic peptide
WANFAKYGNPNETQ

SEQ ID NO: 5255 - protein, 14 aa, Artificial sequence
  synthetic peptide
ANFAKYGNPNETQN

SEQ ID NO: 5256 - protein, 14 aa, Artificial sequence
  synthetic peptide
NFAKYGNPNETQNN

SEQ ID NO: 5257 - protein, 14 aa, Artificial sequence
  synthetic peptide
FAKYGNPNETQNNS

SEQ ID NO: 5258 - protein, 14 aa, Artificial sequence
  synthetic peptide
AKYGNPNETQNNST

SEQ ID NO: 5259 - protein, 14 aa, Artificial sequence
  synthetic peptide
KYGNPNETQNNSTS

SEQ ID NO: 5260 - protein, 14 aa, Artificial sequence
  synthetic peptide
YGNPNETQNNSTSW

SEQ ID NO: 5261 - protein, 14 aa, Artificial sequence
  synthetic peptide
GNPNETQNNSTSWP

SEQ ID NO: 5262 - protein, 14 aa, Artificial sequence
  synthetic peptide
NPNETQNNSTSWPV

SEQ ID NO: 5263 - protein, 14 aa, Artificial sequence
  synthetic peptide
PNETQNNSTSWPVF

SEQ ID NO: 5264 - protein, 14 aa, Artificial sequence
  synthetic peptide
NETQNNSTSWPVFK

SEQ ID NO: 5265 - protein, 14 aa, Artificial sequence
  synthetic peptide
ETQNNSTSWPVFKS

SEQ ID NO: 5266 - protein, 14 aa, Artificial sequence
  synthetic peptide
TQNNSTSWPVFKST

SEQ ID NO: 5267 - protein, 14 aa, Artificial sequence
  synthetic peptide
QNNSTSWPVFKSTE

SEQ ID NO: 5268 - protein, 14 aa, Artificial sequence
  synthetic peptide
NNSTSWPVFKSTEQ

SEQ ID NO: 5269 - protein, 14 aa, Artificial sequence
  synthetic peptide
NSTSWPVFKSTEQK

SEQ ID NO: 5270 - protein, 14 aa, Artificial sequence
  synthetic peptide
STSWPVFKSTEQKY

SEQ ID NO: 5271 - protein, 14 aa, Artificial sequence
  synthetic peptide
TSWPVFKSTEQKYL

SEQ ID NO: 5272 - protein, 14 aa, Artificial sequence
  synthetic peptide
SWPVFKSTEQKYLT

SEQ ID NO: 5273 - protein, 14 aa, Artificial sequence
  synthetic peptide
WPVFKSTEQKYLTL

SEQ ID NO: 5274 - protein, 14 aa, Artificial sequence
  synthetic peptide
PVFKSTEQKYLTLN

SEQ ID NO: 5275 - protein, 14 aa, Artificial sequence
  synthetic peptide
VFKSTEQKYLTLNT

SEQ ID NO: 5276 - protein, 14 aa, Artificial sequence
  synthetic peptide
FKSTEQKYLTLNTE

SEQ ID NO: 5277 - protein, 14 aa, Artificial sequence
  synthetic peptide
KSTEQKYLTLNTES

SEQ ID NO: 5278 - protein, 14 aa, Artificial sequence
  synthetic peptide
STEQKYLTLNTEST

SEQ ID NO: 5279 - protein, 14 aa, Artificial sequence
  synthetic peptide
TEQKYLTLNTESTR

SEQ ID NO: 5280 - protein, 14 aa, Artificial sequence
  synthetic peptide
EQKYLTLNTESTRI

SEQ ID NO: 5281 - protein, 14 aa, Artificial sequence
  synthetic peptide
QKYLTLNTESTRIM

SEQ ID NO: 5282 - protein, 14 aa, Artificial sequence
  synthetic peptide
KYLTLNTESTRIMT

SEQ ID NO: 5283 - protein, 14 aa, Artificial sequence
  synthetic peptide
YLTLNTESTRIMTK

SEQ ID NO: 5284 - protein, 14 aa, Artificial sequence
  synthetic peptide
LTLNTESTRIMTKL

SEQ ID NO: 5285 - protein, 14 aa, Artificial sequence
  synthetic peptide
TLNTESTRIMTKLR

SEQ ID NO: 5286 - protein, 14 aa, Artificial sequence
  synthetic peptide
LNTESTRIMTKLRA

SEQ ID NO: 5287 - protein, 14 aa, Artificial sequence
  synthetic peptide
NTESTRIMTKLRAQ

SEQ ID NO: 5288 - protein, 14 aa, Artificial sequence
  synthetic peptide
TESTRIMTKLRAQQ

SEQ ID NO: 5289 - protein, 14 aa, Artificial sequence
  synthetic peptide
ESTRIMTKLRAQQC

SEQ ID NO: 5290 - protein, 14 aa, Artificial sequence
  synthetic peptide
STRIMTKLRAQQCR

SEQ ID NO: 5291 - protein, 14 aa, Artificial sequence
  synthetic peptide
TRIMTKLRAQQCRF

SEQ ID NO: 5292 - protein, 14 aa, Artificial sequence
  synthetic peptide
RIMTKLRAQQCRFW

SEQ ID NO: 5293 - protein, 14 aa, Artificial sequence
  synthetic peptide
IMTKLRAQQCRFWT

SEQ ID NO: 5294 - protein, 14 aa, Artificial sequence
  synthetic peptide
MTKLRAQQCRFWTS

SEQ ID NO: 5295 - protein, 14 aa, Artificial sequence
  synthetic peptide
TKLRAQQCRFWTSF

SEQ ID NO: 5296 - protein, 14 aa, Artificial sequence
  synthetic peptide
KLRAQQCRFWTSFF

SEQ ID NO: 5297 - protein, 14 aa, Artificial sequence
  synthetic peptide
LRAQQCRFWTSFFP

SEQ ID NO: 5298 - protein, 14 aa, Artificial sequence
  synthetic peptide
RAQQCRFWTSFFPK

SEQ ID NO: 5299 - protein, 14 aa, Artificial sequence
  synthetic peptide
AQQCRFWTSFFPKV

SEQ ID NO: 5300 - protein, 14 aa, Artificial sequence
  synthetic peptide
QQCRFWTSFFPKVL

SEQ ID NO: 5301 - protein, 14 aa, Artificial sequence
  synthetic peptide
QCRFWTSFFPKVLE

SEQ ID NO: 5302 - protein, 14 aa, Artificial sequence
  synthetic peptide
CRFWTSFFPKVLEM

SEQ ID NO: 5303 - protein, 14 aa, Artificial sequence
  synthetic peptide
RFWTSFFPKVLEMT

SEQ ID NO: 5304 - protein, 14 aa, Artificial sequence
  synthetic peptide
FWTSFFPKVLEMTG

SEQ ID NO: 5305 - protein, 14 aa, Artificial sequence
  synthetic peptide
WTSFFPKVLEMTGN

SEQ ID NO: 5306 - protein, 14 aa, Artificial sequence
  synthetic peptide
TSFFPKVLEMTGNI

SEQ ID NO: 5307 - protein, 14 aa, Artificial sequence
  synthetic peptide
SFFPKVLEMTGNID

SEQ ID NO: 5308 - protein, 14 aa, Artificial sequence
  synthetic peptide
FFPKVLEMTGNIDE

SEQ ID NO: 5309 - protein, 14 aa, Artificial sequence
  synthetic peptide
FPKVLEMTGNIDEA

SEQ ID NO: 5310 - protein, 14 aa, Artificial sequence
  synthetic peptide
PKVLEMTGNIDEAE

SEQ ID NO: 5311 - protein, 14 aa, Artificial sequence
  synthetic peptide
KVLEMTGNIDEAEW

SEQ ID NO: 5312 - protein, 14 aa, Artificial sequence
  synthetic peptide
VLEMTGNIDEAEWE

SEQ ID NO: 5313 - protein, 14 aa, Artificial sequence
  synthetic peptide
LEMTGNIDEAEWEW

SEQ ID NO: 5314 - protein, 14 aa, Artificial sequence
  synthetic peptide
EMTGNIDEAEWEWK

SEQ ID NO: 5315 - protein, 14 aa, Artificial sequence
  synthetic peptide
MTGNIDEAEWEWKA

SEQ ID NO: 5316 - protein, 14 aa, Artificial sequence
  synthetic peptide
TGNIDEAEWEWKAG

SEQ ID NO: 5317 - protein, 14 aa, Artificial sequence
  synthetic peptide
GNIDEAEWEWKAGF

SEQ ID NO: 5318 - protein, 14 aa, Artificial sequence
  synthetic peptide
NIDEAEWEWKAGFH

SEQ ID NO: 5319 - protein, 14 aa, Artificial sequence
  synthetic peptide
IDEAEWEWKAGFHR

SEQ ID NO: 5320 - protein, 14 aa, Artificial sequence
  synthetic peptide
DEAEWEWKAGFHRW

SEQ ID NO: 5321 - protein, 14 aa, Artificial sequence
  synthetic peptide
EAEWEWKAGFHRWN

SEQ ID NO: 5322 - protein, 14 aa, Artificial sequence
  synthetic peptide
AEWEWKAGFHRWNN

SEQ ID NO: 5323 - protein, 14 aa, Artificial sequence
  synthetic peptide
EWEWKAGFHRWNNY

SEQ ID NO: 5324 - protein, 14 aa, Artificial sequence
  synthetic peptide
WEWKAGFHRWNNYM

SEQ ID NO: 5325 - protein, 14 aa, Artificial sequence
  synthetic peptide
EWKAGFHRWNNYMM

SEQ ID NO: 5326 - protein, 14 aa, Artificial sequence
  synthetic peptide
WKAGFHRWNNYMMD

SEQ ID NO: 5327 - protein, 14 aa, Artificial sequence
  synthetic peptide
KAGFHRWNNYMMDW

SEQ ID NO: 5328 - protein, 14 aa, Artificial sequence
  synthetic peptide
AGFHRWNNYMMDWK

SEQ ID NO: 5329 - protein, 14 aa, Artificial sequence
  synthetic peptide
GFHRWNNYMMDWKN

SEQ ID NO: 5330 - protein, 14 aa, Artificial sequence
  synthetic peptide
FHRWNNYMMDWKNQ

SEQ ID NO: 5331 - protein, 14 aa, Artificial sequence
  synthetic peptide
HRWNNYMMDWKNQF

SEQ ID NO: 5332 - protein, 14 aa, Artificial sequence
  synthetic peptide
RWNNYMMDWKNQFN

SEQ ID NO: 5333 - protein, 14 aa, Artificial sequence
  synthetic peptide
WNNYMMDWKNQFND

SEQ ID NO: 5334 - protein, 14 aa, Artificial sequence
  synthetic peptide
NNYMMDWKNQFNDY

SEQ ID NO: 5335 - protein, 14 aa, Artificial sequence
  synthetic peptide
NYMMDWKNQFNDYT

SEQ ID NO: 5336 - protein, 14 aa, Artificial sequence
  synthetic peptide
YMMDWKNQFNDYTS

SEQ ID NO: 5337 - protein, 14 aa, Artificial sequence
  synthetic peptide
MMDWKNQFNDYTSK

SEQ ID NO: 5338 - protein, 14 aa, Artificial sequence
  synthetic peptide
MDWKNQFNDYTSKK

SEQ ID NO: 5339 - protein, 14 aa, Artificial sequence
  synthetic peptide
DWKNQFNDYTSKKE

SEQ ID NO: 5340 - protein, 14 aa, Artificial sequence
  synthetic peptide
WKNQFNDYTSKKES

SEQ ID NO: 5341 - protein, 14 aa, Artificial sequence
  synthetic peptide
KNQFNDYTSKKESC

SEQ ID NO: 5342 - protein, 14 aa, Artificial sequence
  synthetic peptide
NQFNDYTSKKESCV

SEQ ID NO: 5343 - protein, 14 aa, Artificial sequence
  synthetic peptide
QFNDYTSKKESCVG

SEQ ID NO: 5344 - protein, 14 aa, Artificial sequence
  synthetic peptide
FNDYTSKKESCVGL

SEQ ID NO: 5345 - protein, 15 aa, Artificial sequence
  synthetic peptide
MHSKVTIICIRFLFW

SEQ ID NO: 5346 - protein, 15 aa, Artificial sequence
  synthetic peptide
HSKVTIICIRFLFWF

SEQ ID NO: 5347 - protein, 15 aa, Artificial sequence
  synthetic peptide
SKVTIICIRFLFWFL

SEQ ID NO: 5348 - protein, 15 aa, Artificial sequence
  synthetic peptide
KVTIICIRFLFWFLL

SEQ ID NO: 5349 - protein, 15 aa, Artificial sequence
  synthetic peptide
VTIICIRFLFWFLLL

SEQ ID NO: 5350 - protein, 15 aa, Artificial sequence
  synthetic peptide
TIICIRFLFWFLLLC

SEQ ID NO: 5351 - protein, 15 aa, Artificial sequence
  synthetic peptide
IICIRFLFWFLLLCM

SEQ ID NO: 5352 - protein, 15 aa, Artificial sequence
  synthetic peptide
ICIRFLFWFLLLCML

SEQ ID NO: 5353 - protein, 15 aa, Artificial sequence
  synthetic peptide
CIRFLFWFLLLCMLI

SEQ ID NO: 5354 - protein, 15 aa, Artificial sequence
  synthetic peptide
IRFLFWFLLLCMLIG

SEQ ID NO: 5355 - protein, 15 aa, Artificial sequence
  synthetic peptide
RFLFWFLLLCMLIGK

SEQ ID NO: 5356 - protein, 15 aa, Artificial sequence
  synthetic peptide
FLFWFLLLCMLIGKS

SEQ ID NO: 5357 - protein, 15 aa, Artificial sequence
  synthetic peptide
LFWFLLLCMLIGKSH

SEQ ID NO: 5358 - protein, 15 aa, Artificial sequence
  synthetic peptide
FWFLLLCMLIGKSHT

SEQ ID NO: 5359 - protein, 15 aa, Artificial sequence
  synthetic peptide
WFLLLCMLIGKSHTE

SEQ ID NO: 5360 - protein, 15 aa, Artificial sequence
  synthetic peptide
FLLLCMLIGKSHTED

SEQ ID NO: 5361 - protein, 15 aa, Artificial sequence
  synthetic peptide
LLLCMLIGKSHTEDD

SEQ ID NO: 5362 - protein, 15 aa, Artificial sequence
  synthetic peptide
LLCMLIGKSHTEDDI

SEQ ID NO: 5363 - protein, 15 aa, Artificial sequence
  synthetic peptide
LCMLIGKSHTEDDII

SEQ ID NO: 5364 - protein, 15 aa, Artificial sequence
  synthetic peptide
CMLIGKSHTEDDIII

SEQ ID NO: 5365 - protein, 15 aa, Artificial sequence
  synthetic peptide
MLIGKSHTEDDIIIA

SEQ ID NO: 5366 - protein, 15 aa, Artificial sequence
  synthetic peptide
LIGKSHTEDDIIIAT

SEQ ID NO: 5367 - protein, 15 aa, Artificial sequence
  synthetic peptide
IGKSHTEDDIIIATK

SEQ ID NO: 5368 - protein, 15 aa, Artificial sequence
  synthetic peptide
GKSHTEDDIIIATKN

SEQ ID NO: 5369 - protein, 15 aa, Artificial sequence
  synthetic peptide
KSHTEDDIIIATKNG

SEQ ID NO: 5370 - protein, 15 aa, Artificial sequence
  synthetic peptide
SHTEDDIIIATKNGK

SEQ ID NO: 5371 - protein, 15 aa, Artificial sequence
  synthetic peptide
HTEDDIIIATKNGKV

SEQ ID NO: 5372 - protein, 15 aa, Artificial sequence
  synthetic peptide
TEDDIIIATKNGKVR

SEQ ID NO: 5373 - protein, 15 aa, Artificial sequence
  synthetic peptide
EDDIIIATKNGKVRG

SEQ ID NO: 5374 - protein, 15 aa, Artificial sequence
  synthetic peptide
DDIIIATKNGKVRGM

SEQ ID NO: 5375 - protein, 15 aa, Artificial sequence
  synthetic peptide
DIIIATKNGKVRGMN

SEQ ID NO: 5376 - protein, 15 aa, Artificial sequence
  synthetic peptide
IIIATKNGKVRGMNL

SEQ ID NO: 5377 - protein, 15 aa, Artificial sequence
  synthetic peptide
IIATKNGKVRGMNLT

SEQ ID NO: 5378 - protein, 15 aa, Artificial sequence
  synthetic peptide
IATKNGKVRGMNLTV

SEQ ID NO: 5379 - protein, 15 aa, Artificial sequence
  synthetic peptide
ATKNGKVRGMNLTVF

SEQ ID NO: 5380 - protein, 15 aa, Artificial sequence
  synthetic peptide
TKNGKVRGMNLTVFG

SEQ ID NO: 5381 - protein, 15 aa, Artificial sequence
  synthetic peptide
KNGKVRGMNLTVFGG

SEQ ID NO: 5382 - protein, 15 aa, Artificial sequence
  synthetic peptide
NGKVRGMNLTVFGGT

SEQ ID NO: 5383 - protein, 15 aa, Artificial sequence
  synthetic peptide
GKVRGMNLTVFGGTV

SEQ ID NO: 5384 - protein, 15 aa, Artificial sequence
  synthetic peptide
KVRGMNLTVFGGTVT

SEQ ID NO: 5385 - protein, 15 aa, Artificial sequence
  synthetic peptide
VRGMNLTVFGGTVTA

SEQ ID NO: 5386 - protein, 15 aa, Artificial sequence
  synthetic peptide
RGMNLTVFGGTVTAF

SEQ ID NO: 5387 - protein, 15 aa, Artificial sequence
  synthetic peptide
GMNLTVFGGTVTAFL

SEQ ID NO: 5388 - protein, 15 aa, Artificial sequence
  synthetic peptide
MNLTVFGGTVTAFLG

SEQ ID NO: 5389 - protein, 15 aa, Artificial sequence
  synthetic peptide
NLTVFGGTVTAFLGI

SEQ ID NO: 5390 - protein, 15 aa, Artificial sequence
  synthetic peptide
LTVFGGTVTAFLGIP

SEQ ID NO: 5391 - protein, 15 aa, Artificial sequence
  synthetic peptide
TVFGGTVTAFLGIPY

SEQ ID NO: 5392 - protein, 15 aa, Artificial sequence
  synthetic peptide
VFGGTVTAFLGIPYA

SEQ ID NO: 5393 - protein, 15 aa, Artificial sequence
  synthetic peptide
FGGTVTAFLGIPYAQ

SEQ ID NO: 5394 - protein, 15 aa, Artificial sequence
  synthetic peptide
GGTVTAFLGIPYAQP

SEQ ID NO: 5395 - protein, 15 aa, Artificial sequence
  synthetic peptide
GTVTAFLGIPYAQPP

SEQ ID NO: 5396 - protein, 15 aa, Artificial sequence
  synthetic peptide
TVTAFLGIPYAQPPL

SEQ ID NO: 5397 - protein, 15 aa, Artificial sequence
  synthetic peptide
VTAFLGIPYAQPPLG

SEQ ID NO: 5398 - protein, 15 aa, Artificial sequence
  synthetic peptide
TAFLGIPYAQPPLGR

SEQ ID NO: 5399 - protein, 15 aa, Artificial sequence
  synthetic peptide
AFLGIPYAQPPLGRL

SEQ ID NO: 5400 - protein, 15 aa, Artificial sequence
  synthetic peptide
FLGIPYAQPPLGRLR

SEQ ID NO: 5401 - protein, 15 aa, Artificial sequence
  synthetic peptide
LGIPYAQPPLGRLRF

SEQ ID NO: 5402 - protein, 15 aa, Artificial sequence
  synthetic peptide
GIPYAQPPLGRLRFK

SEQ ID NO: 5403 - protein, 15 aa, Artificial sequence
  synthetic peptide
IPYAQPPLGRLRFKK

SEQ ID NO: 5404 - protein, 15 aa, Artificial sequence
  synthetic peptide
PYAQPPLGRLRFKKP

SEQ ID NO: 5405 - protein, 15 aa, Artificial sequence
  synthetic peptide
YAQPPLGRLRFKKPQ

SEQ ID NO: 5406 - protein, 15 aa, Artificial sequence
  synthetic peptide
AQPPLGRLRFKKPQS

SEQ ID NO: 5407 - protein, 15 aa, Artificial sequence
  synthetic peptide
QPPLGRLRFKKPQSL

SEQ ID NO: 5408 - protein, 15 aa, Artificial sequence
  synthetic peptide
PPLGRLRFKKPQSLT

SEQ ID NO: 5409 - protein, 15 aa, Artificial sequence
  synthetic peptide
PLGRLRFKKPQSLTK

SEQ ID NO: 5410 - protein, 15 aa, Artificial sequence
  synthetic peptide
LGRLRFKKPQSLTKW

SEQ ID NO: 5411 - protein, 15 aa, Artificial sequence
  synthetic peptide
GRLRFKKPQSLTKWS

SEQ ID NO: 5412 - protein, 15 aa, Artificial sequence
  synthetic peptide
RLRFKKPQSLTKWSD

SEQ ID NO: 5413 - protein, 15 aa, Artificial sequence
  synthetic peptide
LRFKKPQSLTKWSDI

SEQ ID NO: 5414 - protein, 15 aa, Artificial sequence
  synthetic peptide
RFKKPQSLTKWSDIW

SEQ ID NO: 5415 - protein, 15 aa, Artificial sequence
  synthetic peptide
FKKPQSLTKWSDIWN

SEQ ID NO: 5416 - protein, 15 aa, Artificial sequence
  synthetic peptide
KKPQSLTKWSDIWNA

SEQ ID NO: 5417 - protein, 15 aa, Artificial sequence
  synthetic peptide
KPQSLTKWSDIWNAT

SEQ ID NO: 5418 - protein, 15 aa, Artificial sequence
  synthetic peptide
PQSLTKWSDIWNATK

SEQ ID NO: 5419 - protein, 15 aa, Artificial sequence
  synthetic peptide
QSLTKWSDIWNATKY

SEQ ID NO: 5420 - protein, 15 aa, Artificial sequence
  synthetic peptide
SLTKWSDIWNATKYA

SEQ ID NO: 5421 - protein, 15 aa, Artificial sequence
  synthetic peptide
LTKWSDIWNATKYAN

SEQ ID NO: 5422 - protein, 15 aa, Artificial sequence
  synthetic peptide
TKWSDIWNATKYANS

SEQ ID NO: 5423 - protein, 15 aa, Artificial sequence
  synthetic peptide
KWSDIWNATKYANSC

SEQ ID NO: 5424 - protein, 15 aa, Artificial sequence
  synthetic peptide
WSDIWNATKYANSCC

SEQ ID NO: 5425 - protein, 15 aa, Artificial sequence
  synthetic peptide
SDIWNATKYANSCCQ

SEQ ID NO: 5426 - protein, 15 aa, Artificial sequence
  synthetic peptide
DIWNATKYANSCCQN

SEQ ID NO: 5427 - protein, 15 aa, Artificial sequence
  synthetic peptide
IWNATKYANSCCQNI

SEQ ID NO: 5428 - protein, 15 aa, Artificial sequence
  synthetic peptide
WNATKYANSCCQNID

SEQ ID NO: 5429 - protein, 15 aa, Artificial sequence
  synthetic peptide
NATKYANSCCQNIDQ

SEQ ID NO: 5430 - protein, 15 aa, Artificial sequence
  synthetic peptide
ATKYANSCCQNIDQS

SEQ ID NO: 5431 - protein, 15 aa, Artificial sequence
  synthetic peptide
TKYANSCCQNIDQSF

SEQ ID NO: 5432 - protein, 15 aa, Artificial sequence
  synthetic peptide
KYANSCCQNIDQSFP

SEQ ID NO: 5433 - protein, 15 aa, Artificial sequence
  synthetic peptide
YANSCCQNIDQSFPG

SEQ ID NO: 5434 - protein, 15 aa, Artificial sequence
  synthetic peptide
ANSCCQNIDQSFPGF

SEQ ID NO: 5435 - protein, 15 aa, Artificial sequence
  synthetic peptide
NSCCQNIDQSFPGFH

SEQ ID NO: 5436 - protein, 15 aa, Artificial sequence
  synthetic peptide
SCCQNIDQSFPGFHG

SEQ ID NO: 5437 - protein, 15 aa, Artificial sequence
  synthetic peptide
CCQNIDQSFPGFHGS

SEQ ID NO: 5438 - protein, 15 aa, Artificial sequence
  synthetic peptide
CQNIDQSFPGFHGSE

SEQ ID NO: 5439 - protein, 15 aa, Artificial sequence
  synthetic peptide
QNIDQSFPGFHGSEM

SEQ ID NO: 5440 - protein, 15 aa, Artificial sequence
  synthetic peptide
NIDQSFPGFHGSEMW

SEQ ID NO: 5441 - protein, 15 aa, Artificial sequence
  synthetic peptide
IDQSFPGFHGSEMWN

SEQ ID NO: 5442 - protein, 15 aa, Artificial sequence
  synthetic peptide
DQSFPGFHGSEMWNP

SEQ ID NO: 5443 - protein, 15 aa, Artificial sequence
  synthetic peptide
QSFPGFHGSEMWNPN

SEQ ID NO: 5444 - protein, 15 aa, Artificial sequence
  synthetic peptide
SFPGFHGSEMWNPNT

SEQ ID NO: 5445 - protein, 15 aa, Artificial sequence
  synthetic peptide
FPGFHGSEMWNPNTD

SEQ ID NO: 5446 - protein, 15 aa, Artificial sequence
  synthetic peptide
PGFHGSEMWNPNTDL

SEQ ID NO: 5447 - protein, 15 aa, Artificial sequence
  synthetic peptide
GFHGSEMWNPNTDLS

SEQ ID NO: 5448 - protein, 15 aa, Artificial sequence
  synthetic peptide
FHGSEMWNPNTDLSE

SEQ ID NO: 5449 - protein, 15 aa, Artificial sequence
  synthetic peptide
HGSEMWNPNTDLSED

SEQ ID NO: 5450 - protein, 15 aa, Artificial sequence
  synthetic peptide
GSEMWNPNTDLSEDC

SEQ ID NO: 5451 - protein, 15 aa, Artificial sequence
  synthetic peptide
SEMWNPNTDLSEDCL

SEQ ID NO: 5452 - protein, 15 aa, Artificial sequence
  synthetic peptide
EMWNPNTDLSEDCLY

SEQ ID NO: 5453 - protein, 15 aa, Artificial sequence
  synthetic peptide
MWNPNTDLSEDCLYL

SEQ ID NO: 5454 - protein, 15 aa, Artificial sequence
  synthetic peptide
WNPNTDLSEDCLYLN

SEQ ID NO: 5455 - protein, 15 aa, Artificial sequence
  synthetic peptide
NPNTDLSEDCLYLNV

SEQ ID NO: 5456 - protein, 15 aa, Artificial sequence
  synthetic peptide
PNTDLSEDCLYLNVW

SEQ ID NO: 5457 - protein, 15 aa, Artificial sequence
  synthetic peptide
NTDLSEDCLYLNVWI

SEQ ID NO: 5458 - protein, 15 aa, Artificial sequence
  synthetic peptide
TDLSEDCLYLNVWIP

SEQ ID NO: 5459 - protein, 15 aa, Artificial sequence
  synthetic peptide
DLSEDCLYLNVWIPA

SEQ ID NO: 5460 - protein, 15 aa, Artificial sequence
  synthetic peptide
LSEDCLYLNVWIPAP

SEQ ID NO: 5461 - protein, 15 aa, Artificial sequence
  synthetic peptide
SEDCLYLNVWIPAPK

SEQ ID NO: 5462 - protein, 15 aa, Artificial sequence
  synthetic peptide
EDCLYLNVWIPAPKP

SEQ ID NO: 5463 - protein, 15 aa, Artificial sequence
  synthetic peptide
DCLYLNVWIPAPKPK

SEQ ID NO: 5464 - protein, 15 aa, Artificial sequence
  synthetic peptide
CLYLNVWIPAPKPKN

SEQ ID NO: 5465 - protein, 15 aa, Artificial sequence
  synthetic peptide
LYLNVWIPAPKPKNA

SEQ ID NO: 5466 - protein, 15 aa, Artificial sequence
  synthetic peptide
YLNVWIPAPKPKNAT

SEQ ID NO: 5467 - protein, 15 aa, Artificial sequence
  synthetic peptide
LNVWIPAPKPKNATV

SEQ ID NO: 5468 - protein, 15 aa, Artificial sequence
  synthetic peptide
NVWIPAPKPKNATVL

SEQ ID NO: 5469 - protein, 15 aa, Artificial sequence
  synthetic peptide
VWIPAPKPKNATVLI

SEQ ID NO: 5470 - protein, 15 aa, Artificial sequence
  synthetic peptide
WIPAPKPKNATVLIW

SEQ ID NO: 5471 - protein, 15 aa, Artificial sequence
  synthetic peptide
IPAPKPKNATVLIWI

SEQ ID NO: 5472 - protein, 15 aa, Artificial sequence
  synthetic peptide
PAPKPKNATVLIWIY

SEQ ID NO: 5473 - protein, 15 aa, Artificial sequence
  synthetic peptide
APKPKNATVLIWIYG

SEQ ID NO: 5474 - protein, 15 aa, Artificial sequence
  synthetic peptide
PKPKNATVLIWIYGG

SEQ ID NO: 5475 - protein, 15 aa, Artificial sequence
  synthetic peptide
KPKNATVLIWIYGGG

SEQ ID NO: 5476 - protein, 15 aa, Artificial sequence
  synthetic peptide
PKNATVLIWIYGGGF

SEQ ID NO: 5477 - protein, 15 aa, Artificial sequence
  synthetic peptide
KNATVLIWIYGGGFQ

SEQ ID NO: 5478 - protein, 15 aa, Artificial sequence
  synthetic peptide
NATVLIWIYGGGFQT

SEQ ID NO: 5479 - protein, 15 aa, Artificial sequence
  synthetic peptide
ATVLIWIYGGGFQTG

SEQ ID NO: 5480 - protein, 15 aa, Artificial sequence
  synthetic peptide
TVLIWIYGGGFQTGT

SEQ ID NO: 5481 - protein, 15 aa, Artificial sequence
  synthetic peptide
VLIWIYGGGFQTGTS

SEQ ID NO: 5482 - protein, 15 aa, Artificial sequence
  synthetic peptide
LIWIYGGGFQTGTSS

SEQ ID NO: 5483 - protein, 15 aa, Artificial sequence
  synthetic peptide
IWIYGGGFQTGTSSL

SEQ ID NO: 5484 - protein, 15 aa, Artificial sequence
  synthetic peptide
WIYGGGFQTGTSSLH

SEQ ID NO: 5485 - protein, 15 aa, Artificial sequence
  synthetic peptide
IYGGGFQTGTSSLHV

SEQ ID NO: 5486 - protein, 15 aa, Artificial sequence
  synthetic peptide
YGGGFQTGTSSLHVY

SEQ ID NO: 5487 - protein, 15 aa, Artificial sequence
  synthetic peptide
GGGFQTGTSSLHVYD

SEQ ID NO: 5488 - protein, 15 aa, Artificial sequence
  synthetic peptide
GGFQTGTSSLHVYDG

SEQ ID NO: 5489 - protein, 15 aa, Artificial sequence
  synthetic peptide
GFQTGTSSLHVYDGK

SEQ ID NO: 5490 - protein, 15 aa, Artificial sequence
  synthetic peptide
FQTGTSSLHVYDGKF

SEQ ID NO: 5491 - protein, 15 aa, Artificial sequence
  synthetic peptide
QTGTSSLHVYDGKFL

SEQ ID NO: 5492 - protein, 15 aa, Artificial sequence
  synthetic peptide
TGTSSLHVYDGKFLA

SEQ ID NO: 5493 - protein, 15 aa, Artificial sequence
  synthetic peptide
GTSSLHVYDGKFLAR

SEQ ID NO: 5494 - protein, 15 aa, Artificial sequence
  synthetic peptide
TSSLHVYDGKFLARV

SEQ ID NO: 5495 - protein, 15 aa, Artificial sequence
  synthetic peptide
SSLHVYDGKFLARVE

SEQ ID NO: 5496 - protein, 15 aa, Artificial sequence
  synthetic peptide
SLHVYDGKFLARVER

SEQ ID NO: 5497 - protein, 15 aa, Artificial sequence
  synthetic peptide
LHVYDGKFLARVERV

SEQ ID NO: 5498 - protein, 15 aa, Artificial sequence
  synthetic peptide
HVYDGKFLARVERVI

SEQ ID NO: 5499 - protein, 15 aa, Artificial sequence
  synthetic peptide
VYDGKFLARVERVIV

SEQ ID NO: 5500 - protein, 15 aa, Artificial sequence
  synthetic peptide
YDGKFLARVERVIVV

SEQ ID NO: 5501 - protein, 15 aa, Artificial sequence
  synthetic peptide
DGKFLARVERVIVVS

SEQ ID NO: 5502 - protein, 15 aa, Artificial sequence
  synthetic peptide
GKFLARVERVIVVSM

SEQ ID NO: 5503 - protein, 15 aa, Artificial sequence
  synthetic peptide
KFLARVERVIVVSMN

SEQ ID NO: 5504 - protein, 15 aa, Artificial sequence
  synthetic peptide
FLARVERVIVVSMNY

SEQ ID NO: 5505 - protein, 15 aa, Artificial sequence
  synthetic peptide
LARVERVIVVSMNYR

SEQ ID NO: 5506 - protein, 15 aa, Artificial sequence
  synthetic peptide
ARVERVIVVSMNYRV

SEQ ID NO: 5507 - protein, 15 aa, Artificial sequence
  synthetic peptide
RVERVIVVSMNYRVG

SEQ ID NO: 5508 - protein, 15 aa, Artificial sequence
  synthetic peptide
VERVIVVSMNYRVGA

SEQ ID NO: 5509 - protein, 15 aa, Artificial sequence
  synthetic peptide
ERVIVVSMNYRVGAL

SEQ ID NO: 5510 - protein, 15 aa, Artificial sequence
  synthetic peptide
RVIVVSMNYRVGALG

SEQ ID NO: 5511 - protein, 15 aa, Artificial sequence
  synthetic peptide
VIVVSMNYRVGALGF

SEQ ID NO: 5512 - protein, 15 aa, Artificial sequence
  synthetic peptide
IVVSMNYRVGALGFL

SEQ ID NO: 5513 - protein, 15 aa, Artificial sequence
  synthetic peptide
VVSMNYRVGALGFLA

SEQ ID NO: 5514 - protein, 15 aa, Artificial sequence
  synthetic peptide
VSMNYRVGALGFLAL

SEQ ID NO: 5515 - protein, 15 aa, Artificial sequence
  synthetic peptide
SMNYRVGALGFLALP

SEQ ID NO: 5516 - protein, 15 aa, Artificial sequence
  synthetic peptide
MNYRVGALGFLALPG

SEQ ID NO: 5517 - protein, 15 aa, Artificial sequence
  synthetic peptide
NYRVGALGFLALPGN

SEQ ID NO: 5518 - protein, 15 aa, Artificial sequence
  synthetic peptide
YRVGALGFLALPGNP

SEQ ID NO: 5519 - protein, 15 aa, Artificial sequence
  synthetic peptide
RVGALGFLALPGNPE

SEQ ID NO: 5520 - protein, 15 aa, Artificial sequence
  synthetic peptide
VGALGFLALPGNPEA

SEQ ID NO: 5521 - protein, 15 aa, Artificial sequence
  synthetic peptide
GALGFLALPGNPEAP

SEQ ID NO: 5522 - protein, 15 aa, Artificial sequence
  synthetic peptide
ALGFLALPGNPEAPG

SEQ ID NO: 5523 - protein, 15 aa, Artificial sequence
  synthetic peptide
LGFLALPGNPEAPGN

SEQ ID NO: 5524 - protein, 15 aa, Artificial sequence
  synthetic peptide
GFLALPGNPEAPGNM

SEQ ID NO: 5525 - protein, 15 aa, Artificial sequence
  synthetic peptide
FLALPGNPEAPGNMG

SEQ ID NO: 5526 - protein, 15 aa, Artificial sequence
  synthetic peptide
LALPGNPEAPGNMGL

SEQ ID NO: 5527 - protein, 15 aa, Artificial sequence
  synthetic peptide
ALPGNPEAPGNMGLF

SEQ ID NO: 5528 - protein, 15 aa, Artificial sequence
  synthetic peptide
LPGNPEAPGNMGLFD

SEQ ID NO: 5529 - protein, 15 aa, Artificial sequence
  synthetic peptide
PGNPEAPGNMGLFDQ

SEQ ID NO: 5530 - protein, 15 aa, Artificial sequence
  synthetic peptide
GNPEAPGNMGLFDQQ

SEQ ID NO: 5531 - protein, 15 aa, Artificial sequence
  synthetic peptide
NPEAPGNMGLFDQQL

SEQ ID NO: 5532 - protein, 15 aa, Artificial sequence
  synthetic peptide
PEAPGNMGLFDQQLA

SEQ ID NO: 5533 - protein, 15 aa, Artificial sequence
  synthetic peptide
EAPGNMGLFDQQLAL

SEQ ID NO: 5534 - protein, 15 aa, Artificial sequence
  synthetic peptide
APGNMGLFDQQLALQ

SEQ ID NO: 5535 - protein, 15 aa, Artificial sequence
  synthetic peptide
PGNMGLFDQQLALQW

SEQ ID NO: 5536 - protein, 15 aa, Artificial sequence
  synthetic peptide
GNMGLFDQQLALQWV

SEQ ID NO: 5537 - protein, 15 aa, Artificial sequence
  synthetic peptide
NMGLFDQQLALQWVQ

SEQ ID NO: 5538 - protein, 15 aa, Artificial sequence
  synthetic peptide
MGLFDQQLALQWVQK

SEQ ID NO: 5539 - protein, 15 aa, Artificial sequence
  synthetic peptide
GLFDQQLALQWVQKN

SEQ ID NO: 5540 - protein, 15 aa, Artificial sequence
  synthetic peptide
LFDQQLALQWVQKNI

SEQ ID NO: 5541 - protein, 15 aa, Artificial sequence
  synthetic peptide
FDQQLALQWVQKNIA

SEQ ID NO: 5542 - protein, 15 aa, Artificial sequence
  synthetic peptide
DQQLALQWVQKNIAA

SEQ ID NO: 5543 - protein, 15 aa, Artificial sequence
  synthetic peptide
QQLALQWVQKNIAAF

SEQ ID NO: 5544 - protein, 15 aa, Artificial sequence
  synthetic peptide
QLALQWVQKNIAAFG

SEQ ID NO: 5545 - protein, 15 aa, Artificial sequence
  synthetic peptide
LALQWVQKNIAAFGG

SEQ ID NO: 5546 - protein, 15 aa, Artificial sequence
  synthetic peptide
ALQWVQKNIAAFGGN

SEQ ID NO: 5547 - protein, 15 aa, Artificial sequence
  synthetic peptide
LQWVQKNIAAFGGNP

SEQ ID NO: 5548 - protein, 15 aa, Artificial sequence
  synthetic peptide
QWVQKNIAAFGGNPK

SEQ ID NO: 5549 - protein, 15 aa, Artificial sequence
  synthetic peptide
WVQKNIAAFGGNPKS

SEQ ID NO: 5550 - protein, 15 aa, Artificial sequence
  synthetic peptide
VQKNIAAFGGNPKSV

SEQ ID NO: 5551 - protein, 15 aa, Artificial sequence
  synthetic peptide
QKNIAAFGGNPKSVT

SEQ ID NO: 5552 - protein, 15 aa, Artificial sequence
  synthetic peptide
KNIAAFGGNPKSVTL

SEQ ID NO: 5553 - protein, 15 aa, Artificial sequence
  synthetic peptide
NIAAFGGNPKSVTLF

SEQ ID NO: 5554 - protein, 15 aa, Artificial sequence
  synthetic peptide
IAAFGGNPKSVTLFG

SEQ ID NO: 5555 - protein, 15 aa, Artificial sequence
  synthetic peptide
AAFGGNPKSVTLFGE

SEQ ID NO: 5556 - protein, 15 aa, Artificial sequence
  synthetic peptide
AFGGNPKSVTLFGES

SEQ ID NO: 5557 - protein, 15 aa, Artificial sequence
  synthetic peptide
FGGNPKSVTLFGESA

SEQ ID NO: 5558 - protein, 15 aa, Artificial sequence
  synthetic peptide
GGNPKSVTLFGESAG

SEQ ID NO: 5559 - protein, 15 aa, Artificial sequence
  synthetic peptide
GNPKSVTLFGESAGA

SEQ ID NO: 5560 - protein, 15 aa, Artificial sequence
  synthetic peptide
NPKSVTLFGESAGAA

SEQ ID NO: 5561 - protein, 15 aa, Artificial sequence
  synthetic peptide
PKSVTLFGESAGAAS

SEQ ID NO: 5562 - protein, 15 aa, Artificial sequence
  synthetic peptide
KSVTLFGESAGAASV

SEQ ID NO: 5563 - protein, 15 aa, Artificial sequence
  synthetic peptide
SVTLFGESAGAASVS

SEQ ID NO: 5564 - protein, 15 aa, Artificial sequence
  synthetic peptide
VTLFGESAGAASVSL

SEQ ID NO: 5565 - protein, 15 aa, Artificial sequence
  synthetic peptide
TLFGESAGAASVSLH

SEQ ID NO: 5566 - protein, 15 aa, Artificial sequence
  synthetic peptide
LFGESAGAASVSLHL

SEQ ID NO: 5567 - protein, 15 aa, Artificial sequence
  synthetic peptide
FGESAGAASVSLHLL

SEQ ID NO: 5568 - protein, 15 aa, Artificial sequence
  synthetic peptide
GESAGAASVSLHLLS

SEQ ID NO: 5569 - protein, 15 aa, Artificial sequence
  synthetic peptide
ESAGAASVSLHLLSP

SEQ ID NO: 5570 - protein, 15 aa, Artificial sequence
  synthetic peptide
SAGAASVSLHLLSPG

SEQ ID NO: 5571 - protein, 15 aa, Artificial sequence
  synthetic peptide
AGAASVSLHLLSPGS

SEQ ID NO: 5572 - protein, 15 aa, Artificial sequence
  synthetic peptide
GAASVSLHLLSPGSH

SEQ ID NO: 5573 - protein, 15 aa, Artificial sequence
  synthetic peptide
AASVSLHLLSPGSHS

SEQ ID NO: 5574 - protein, 15 aa, Artificial sequence
  synthetic peptide
ASVSLHLLSPGSHSL

SEQ ID NO: 5575 - protein, 15 aa, Artificial sequence
  synthetic peptide
SVSLHLLSPGSHSLF

SEQ ID NO: 5576 - protein, 15 aa, Artificial sequence
  synthetic peptide
VSLHLLSPGSHSLFT

SEQ ID NO: 5577 - protein, 15 aa, Artificial sequence
  synthetic peptide
SLHLLSPGSHSLFTR

SEQ ID NO: 5578 - protein, 15 aa, Artificial sequence
  synthetic peptide
LHLLSPGSHSLFTRA

SEQ ID NO: 5579 - protein, 15 aa, Artificial sequence
  synthetic peptide
HLLSPGSHSLFTRAI

SEQ ID NO: 5580 - protein, 15 aa, Artificial sequence
  synthetic peptide
LLSPGSHSLFTRAIL

SEQ ID NO: 5581 - protein, 15 aa, Artificial sequence
  synthetic peptide
LSPGSHSLFTRAILQ

SEQ ID NO: 5582 - protein, 15 aa, Artificial sequence
  synthetic peptide
SPGSHSLFTRAILQS

SEQ ID NO: 5583 - protein, 15 aa, Artificial sequence
  synthetic peptide
PGSHSLFTRAILQSG

SEQ ID NO: 5584 - protein, 15 aa, Artificial sequence
  synthetic peptide
GSHSLFTRAILQSGS

SEQ ID NO: 5585 - protein, 15 aa, Artificial sequence
  synthetic peptide
SHSLFTRAILQSGSF

SEQ ID NO: 5586 - protein, 15 aa, Artificial sequence
  synthetic peptide
HSLFTRAILQSGSFN

SEQ ID NO: 5587 - protein, 15 aa, Artificial sequence
  synthetic peptide
SLFTRAILQSGSFNA

SEQ ID NO: 5588 - protein, 15 aa, Artificial sequence
  synthetic peptide
LFTRAILQSGSFNAP

SEQ ID NO: 5589 - protein, 15 aa, Artificial sequence
  synthetic peptide
FTRAILQSGSFNAPW

SEQ ID NO: 5590 - protein, 15 aa, Artificial sequence
  synthetic peptide
TRAILQSGSFNAPWA

SEQ ID NO: 5591 - protein, 15 aa, Artificial sequence
  synthetic peptide
RAILQSGSFNAPWAV

SEQ ID NO: 5592 - protein, 15 aa, Artificial sequence
  synthetic peptide
AILQSGSFNAPWAVT

SEQ ID NO: 5593 - protein, 15 aa, Artificial sequence
  synthetic peptide
ILQSGSFNAPWAVTS

SEQ ID NO: 5594 - protein, 15 aa, Artificial sequence
  synthetic peptide
LQSGSFNAPWAVTSL

SEQ ID NO: 5595 - protein, 15 aa, Artificial sequence
  synthetic peptide
QSGSFNAPWAVTSLY

SEQ ID NO: 5596 - protein, 15 aa, Artificial sequence
  synthetic peptide
SGSFNAPWAVTSLYE

SEQ ID NO: 5597 - protein, 15 aa, Artificial sequence
  synthetic peptide
GSFNAPWAVTSLYEA

SEQ ID NO: 5598 - protein, 15 aa, Artificial sequence
  synthetic peptide
SFNAPWAVTSLYEAR

SEQ ID NO: 5599 - protein, 15 aa, Artificial sequence
  synthetic peptide
FNAPWAVTSLYEARN

SEQ ID NO: 5600 - protein, 15 aa, Artificial sequence
  synthetic peptide
NAPWAVTSLYEARNR

SEQ ID NO: 5601 - protein, 15 aa, Artificial sequence
  synthetic peptide
APWAVTSLYEARNRT

SEQ ID NO: 5602 - protein, 15 aa, Artificial sequence
  synthetic peptide
PWAVTSLYEARNRTL

SEQ ID NO: 5603 - protein, 15 aa, Artificial sequence
  synthetic peptide
WAVTSLYEARNRTLN

SEQ ID NO: 5604 - protein, 15 aa, Artificial sequence
  synthetic peptide
AVTSLYEARNRTLNL

SEQ ID NO: 5605 - protein, 15 aa, Artificial sequence
  synthetic peptide
VTSLYEARNRTLNLA

SEQ ID NO: 5606 - protein, 15 aa, Artificial sequence
  synthetic peptide
TSLYEARNRTLNLAK

SEQ ID NO: 5607 - protein, 15 aa, Artificial sequence
  synthetic peptide
SLYEARNRTLNLAKL

SEQ ID NO: 5608 - protein, 15 aa, Artificial sequence
  synthetic peptide
LYEARNRTLNLAKLT

SEQ ID NO: 5609 - protein, 15 aa, Artificial sequence
  synthetic peptide
YEARNRTLNLAKLTG

SEQ ID NO: 5610 - protein, 15 aa, Artificial sequence
  synthetic peptide
EARNRTLNLAKLTGC

SEQ ID NO: 5611 - protein, 15 aa, Artificial sequence
  synthetic peptide
ARNRTLNLAKLTGCS

SEQ ID NO: 5612 - protein, 15 aa, Artificial sequence
  synthetic peptide
RNRTLNLAKLTGCSR

SEQ ID NO: 5613 - protein, 15 aa, Artificial sequence
  synthetic peptide
NRTLNLAKLTGCSRE

SEQ ID NO: 5614 - protein, 15 aa, Artificial sequence
  synthetic peptide
RTLNLAKLTGCSREN

SEQ ID NO: 5615 - protein, 15 aa, Artificial sequence
  synthetic peptide
TLNLAKLTGCSRENE

SEQ ID NO: 5616 - protein, 15 aa, Artificial sequence
  synthetic peptide
LNLAKLTGCSRENET

SEQ ID NO: 5617 - protein, 15 aa, Artificial sequence
  synthetic peptide
NLAKLTGCSRENETE

SEQ ID NO: 5618 - protein, 15 aa, Artificial sequence
  synthetic peptide
LAKLTGCSRENETEI

SEQ ID NO: 5619 - protein, 15 aa, Artificial sequence
  synthetic peptide
AKLTGCSRENETEII

SEQ ID NO: 5620 - protein, 15 aa, Artificial sequence
  synthetic peptide
KLTGCSRENETEIIK

SEQ ID NO: 5621 - protein, 15 aa, Artificial sequence
  synthetic peptide
LTGCSRENETEIIKC

SEQ ID NO: 5622 - protein, 15 aa, Artificial sequence
  synthetic peptide
TGCSRENETEIIKCL

SEQ ID NO: 5623 - protein, 15 aa, Artificial sequence
  synthetic peptide
GCSRENETEIIKCLR

SEQ ID NO: 5624 - protein, 15 aa, Artificial sequence
  synthetic peptide
CSRENETEIIKCLRN

SEQ ID NO: 5625 - protein, 15 aa, Artificial sequence
  synthetic peptide
SRENETEIIKCLRNK

SEQ ID NO: 5626 - protein, 15 aa, Artificial sequence
  synthetic peptide
RENETEIIKCLRNKD

SEQ ID NO: 5627 - protein, 15 aa, Artificial sequence
  synthetic peptide
ENETEIIKCLRNKDP

SEQ ID NO: 5628 - protein, 15 aa, Artificial sequence
  synthetic peptide
NETEIIKCLRNKDPQ

SEQ ID NO: 5629 - protein, 15 aa, Artificial sequence
  synthetic peptide
ETEIIKCLRNKDPQE

SEQ ID NO: 5630 - protein, 15 aa, Artificial sequence
  synthetic peptide
TEIIKCLRNKDPQEI

SEQ ID NO: 5631 - protein, 15 aa, Artificial sequence
  synthetic peptide
EIIKCLRNKDPQEIL

SEQ ID NO: 5632 - protein, 15 aa, Artificial sequence
  synthetic peptide
IIKCLRNKDPQEILL

SEQ ID NO: 5633 - protein, 15 aa, Artificial sequence
  synthetic peptide
IKCLRNKDPQEILLN

SEQ ID NO: 5634 - protein, 15 aa, Artificial sequence
  synthetic peptide
KCLRNKDPQEILLNE

SEQ ID NO: 5635 - protein, 15 aa, Artificial sequence
  synthetic peptide
CLRNKDPQEILLNEA

SEQ ID NO: 5636 - protein, 15 aa, Artificial sequence
  synthetic peptide
LRNKDPQEILLNEAF

SEQ ID NO: 5637 - protein, 15 aa, Artificial sequence
  synthetic peptide
RNKDPQEILLNEAFV

SEQ ID NO: 5638 - protein, 15 aa, Artificial sequence
  synthetic peptide
NKDPQEILLNEAFVV

SEQ ID NO: 5639 - protein, 15 aa, Artificial sequence
  synthetic peptide
KDPQEILLNEAFVVP

SEQ ID NO: 5640 - protein, 15 aa, Artificial sequence
  synthetic peptide
DPQEILLNEAFVVPY

SEQ ID NO: 5641 - protein, 15 aa, Artificial sequence
  synthetic peptide
PQEILLNEAFVVPYG

SEQ ID NO: 5642 - protein, 15 aa, Artificial sequence
  synthetic peptide
QEILLNEAFVVPYGT

SEQ ID NO: 5643 - protein, 15 aa, Artificial sequence
  synthetic peptide
EILLNEAFVVPYGTP

SEQ ID NO: 5644 - protein, 15 aa, Artificial sequence
  synthetic peptide
ILLNEAFVVPYGTPL

SEQ ID NO: 5645 - protein, 15 aa, Artificial sequence
  synthetic peptide
LLNEAFVVPYGTPLS

SEQ ID NO: 5646 - protein, 15 aa, Artificial sequence
  synthetic peptide
LNEAFVVPYGTPLSV

SEQ ID NO: 5647 - protein, 15 aa, Artificial sequence
  synthetic peptide
NEAFVVPYGTPLSVN

SEQ ID NO: 5648 - protein, 15 aa, Artificial sequence
  synthetic peptide
EAFVVPYGTPLSVNF

SEQ ID NO: 5649 - protein, 15 aa, Artificial sequence
  synthetic peptide
AFVVPYGTPLSVNFG

SEQ ID NO: 5650 - protein, 15 aa, Artificial sequence
  synthetic peptide
FVVPYGTPLSVNFGP

SEQ ID NO: 5651 - protein, 15 aa, Artificial sequence
  synthetic peptide
VVPYGTPLSVNFGPT

SEQ ID NO: 5652 - protein, 15 aa, Artificial sequence
  synthetic peptide
VPYGTPLSVNFGPTV

SEQ ID NO: 5653 - protein, 15 aa, Artificial sequence
  synthetic peptide
PYGTPLSVNFGPTVD

SEQ ID NO: 5654 - protein, 15 aa, Artificial sequence
  synthetic peptide
YGTPLSVNFGPTVDG

SEQ ID NO: 5655 - protein, 15 aa, Artificial sequence
  synthetic peptide
GTPLSVNFGPTVDGD

SEQ ID NO: 5656 - protein, 15 aa, Artificial sequence
  synthetic peptide
TPLSVNFGPTVDGDF

SEQ ID NO: 5657 - protein, 15 aa, Artificial sequence
  synthetic peptide
PLSVNFGPTVDGDFL

SEQ ID NO: 5658 - protein, 15 aa, Artificial sequence
  synthetic peptide
LSVNFGPTVDGDFLT

SEQ ID NO: 5659 - protein, 15 aa, Artificial sequence
  synthetic peptide
SVNFGPTVDGDFLTD

SEQ ID NO: 5660 - protein, 15 aa, Artificial sequence
  synthetic peptide
VNFGPTVDGDFLTDM

SEQ ID NO: 5661 - protein, 15 aa, Artificial sequence
  synthetic peptide
NFGPTVDGDFLTDMP

SEQ ID NO: 5662 - protein, 15 aa, Artificial sequence
  synthetic peptide
FGPTVDGDFLTDMPD

SEQ ID NO: 5663 - protein, 15 aa, Artificial sequence
  synthetic peptide
GPTVDGDFLTDMPDI

SEQ ID NO: 5664 - protein, 15 aa, Artificial sequence
  synthetic peptide
PTVDGDFLTDMPDIL

SEQ ID NO: 5665 - protein, 15 aa, Artificial sequence
  synthetic peptide
TVDGDFLTDMPDILL

SEQ ID NO: 5666 - protein, 15 aa, Artificial sequence
  synthetic peptide
VDGDFLTDMPDILLE

SEQ ID NO: 5667 - protein, 15 aa, Artificial sequence
  synthetic peptide
DGDFLTDMPDILLEL

SEQ ID NO: 5668 - protein, 15 aa, Artificial sequence
  synthetic peptide
GDFLTDMPDILLELG

SEQ ID NO: 5669 - protein, 15 aa, Artificial sequence
  synthetic peptide
DFLTDMPDILLELGQ

SEQ ID NO: 5670 - protein, 15 aa, Artificial sequence
  synthetic peptide
FLTDMPDILLELGQF

SEQ ID NO: 5671 - protein, 15 aa, Artificial sequence
  synthetic peptide
LTDMPDILLELGQFK

SEQ ID NO: 5672 - protein, 15 aa, Artificial sequence
  synthetic peptide
TDMPDILLELGQFKK

SEQ ID NO: 5673 - protein, 15 aa, Artificial sequence
  synthetic peptide
DMPDILLELGQFKKT

SEQ ID NO: 5674 - protein, 15 aa, Artificial sequence
  synthetic peptide
MPDILLELGQFKKTQ

SEQ ID NO: 5675 - protein, 15 aa, Artificial sequence
  synthetic peptide
PDILLELGQFKKTQI

SEQ ID NO: 5676 - protein, 15 aa, Artificial sequence
  synthetic peptide
DILLELGQFKKTQIL

SEQ ID NO: 5677 - protein, 15 aa, Artificial sequence
  synthetic peptide
ILLELGQFKKTQILV

SEQ ID NO: 5678 - protein, 15 aa, Artificial sequence
  synthetic peptide
LLELGQFKKTQILVG

SEQ ID NO: 5679 - protein, 15 aa, Artificial sequence
  synthetic peptide
LELGQFKKTQILVGV

SEQ ID NO: 5680 - protein, 15 aa, Artificial sequence
  synthetic peptide
ELGQFKKTQILVGVN

SEQ ID NO: 5681 - protein, 15 aa, Artificial sequence
  synthetic peptide
LGQFKKTQILVGVNK

SEQ ID NO: 5682 - protein, 15 aa, Artificial sequence
  synthetic peptide
GQFKKTQILVGVNKD

SEQ ID NO: 5683 - protein, 15 aa, Artificial sequence
  synthetic peptide
QFKKTQILVGVNKDE

SEQ ID NO: 5684 - protein, 15 aa, Artificial sequence
  synthetic peptide
FKKTQILVGVNKDEG

SEQ ID NO: 5685 - protein, 15 aa, Artificial sequence
  synthetic peptide
KKTQILVGVNKDEGT

SEQ ID NO: 5686 - protein, 15 aa, Artificial sequence
  synthetic peptide
KTQILVGVNKDEGTA

SEQ ID NO: 5687 - protein, 15 aa, Artificial sequence
  synthetic peptide
TQILVGVNKDEGTAF

SEQ ID NO: 5688 - protein, 15 aa, Artificial sequence
  synthetic peptide
QILVGVNKDEGTAFL

SEQ ID NO: 5689 - protein, 15 aa, Artificial sequence
  synthetic peptide
ILVGVNKDEGTAFLV

SEQ ID NO: 5690 - protein, 15 aa, Artificial sequence
  synthetic peptide
LVGVNKDEGTAFLVY

SEQ ID NO: 5691 - protein, 15 aa, Artificial sequence
  synthetic peptide
VGVNKDEGTAFLVYG

SEQ ID NO: 5692 - protein, 15 aa, Artificial sequence
  synthetic peptide
GVNKDEGTAFLVYGA

SEQ ID NO: 5693 - protein, 15 aa, Artificial sequence
  synthetic peptide
VNKDEGTAFLVYGAP

SEQ ID NO: 5694 - protein, 15 aa, Artificial sequence
  synthetic peptide
NKDEGTAFLVYGAPG

SEQ ID NO: 5695 - protein, 15 aa, Artificial sequence
  synthetic peptide
KDEGTAFLVYGAPGF

SEQ ID NO: 5696 - protein, 15 aa, Artificial sequence
  synthetic peptide
DEGTAFLVYGAPGFS

SEQ ID NO: 5697 - protein, 15 aa, Artificial sequence
  synthetic peptide
EGTAFLVYGAPGFSK

SEQ ID NO: 5698 - protein, 15 aa, Artificial sequence
  synthetic peptide
GTAFLVYGAPGFSKD

SEQ ID NO: 5699 - protein, 15 aa, Artificial sequence
  synthetic peptide
TAFLVYGAPGFSKDN

SEQ ID NO: 5700 - protein, 15 aa, Artificial sequence
  synthetic peptide
AFLVYGAPGFSKDNN

SEQ ID NO: 5701 - protein, 15 aa, Artificial sequence
  synthetic peptide
FLVYGAPGFSKDNNS

SEQ ID NO: 5702 - protein, 15 aa, Artificial sequence
  synthetic peptide
LVYGAPGFSKDNNSI

SEQ ID NO: 5703 - protein, 15 aa, Artificial sequence
  synthetic peptide
VYGAPGFSKDNNSII

SEQ ID NO: 5704 - protein, 15 aa, Artificial sequence
  synthetic peptide
YGAPGFSKDNNSIIT

SEQ ID NO: 5705 - protein, 15 aa, Artificial sequence
  synthetic peptide
GAPGFSKDNNSIITR

SEQ ID NO: 5706 - protein, 15 aa, Artificial sequence
  synthetic peptide
APGFSKDNNSIITRK

SEQ ID NO: 5707 - protein, 15 aa, Artificial sequence
  synthetic peptide
PGFSKDNNSIITRKE

SEQ ID NO: 5708 - protein, 15 aa, Artificial sequence
  synthetic peptide
GFSKDNNSIITRKEF

SEQ ID NO: 5709 - protein, 15 aa, Artificial sequence
  synthetic peptide
FSKDNNSIITRKEFQ

SEQ ID NO: 5710 - protein, 15 aa, Artificial sequence
  synthetic peptide
SKDNNSIITRKEFQE

SEQ ID NO: 5711 - protein, 15 aa, Artificial sequence
  synthetic peptide
KDNNSIITRKEFQEG

SEQ ID NO: 5712 - protein, 15 aa, Artificial sequence
  synthetic peptide
DNNSIITRKEFQEGL

SEQ ID NO: 5713 - protein, 15 aa, Artificial sequence
  synthetic peptide
NNSIITRKEFQEGLK

SEQ ID NO: 5714 - protein, 15 aa, Artificial sequence
  synthetic peptide
NSIITRKEFQEGLKI

SEQ ID NO: 5715 - protein, 15 aa, Artificial sequence
  synthetic peptide
SIITRKEFQEGLKIF

SEQ ID NO: 5716 - protein, 15 aa, Artificial sequence
  synthetic peptide
IITRKEFQEGLKIFF

SEQ ID NO: 5717 - protein, 15 aa, Artificial sequence
  synthetic peptide
ITRKEFQEGLKIFFP

SEQ ID NO: 5718 - protein, 15 aa, Artificial sequence
  synthetic peptide
TRKEFQEGLKIFFPG

SEQ ID NO: 5719 - protein, 15 aa, Artificial sequence
  synthetic peptide
RKEFQEGLKIFFPGV

SEQ ID NO: 5720 - protein, 15 aa, Artificial sequence
  synthetic peptide
KEFQEGLKIFFPGVS

SEQ ID NO: 5721 - protein, 15 aa, Artificial sequence
  synthetic peptide
EFQEGLKIFFPGVSE

SEQ ID NO: 5722 - protein, 15 aa, Artificial sequence
  synthetic peptide
FQEGLKIFFPGVSEF

SEQ ID NO: 5723 - protein, 15 aa, Artificial sequence
  synthetic peptide
QEGLKIFFPGVSEFG

SEQ ID NO: 5724 - protein, 15 aa, Artificial sequence
  synthetic peptide
EGLKIFFPGVSEFGK

SEQ ID NO: 5725 - protein, 15 aa, Artificial sequence
  synthetic peptide
GLKIFFPGVSEFGKE

SEQ ID NO: 5726 - protein, 15 aa, Artificial sequence
  synthetic peptide
LKIFFPGVSEFGKES

SEQ ID NO: 5727 - protein, 15 aa, Artificial sequence
  synthetic peptide
KIFFPGVSEFGKESI

SEQ ID NO: 5728 - protein, 15 aa, Artificial sequence
  synthetic peptide
IFFPGVSEFGKESIL

SEQ ID NO: 5729 - protein, 15 aa, Artificial sequence
  synthetic peptide
FFPGVSEFGKESILF

SEQ ID NO: 5730 - protein, 15 aa, Artificial sequence
  synthetic peptide
FPGVSEFGKESILFH

SEQ ID NO: 5731 - protein, 15 aa, Artificial sequence
  synthetic peptide
PGVSEFGKESILFHY

SEQ ID NO: 5732 - protein, 15 aa, Artificial sequence
  synthetic peptide
GVSEFGKESILFHYT

SEQ ID NO: 5733 - protein, 15 aa, Artificial sequence
  synthetic peptide
VSEFGKESILFHYTD

SEQ ID NO: 5734 - protein, 15 aa, Artificial sequence
  synthetic peptide
SEFGKESILFHYTDW

SEQ ID NO: 5735 - protein, 15 aa, Artificial sequence
  synthetic peptide
EFGKESILFHYTDWV

SEQ ID NO: 5736 - protein, 15 aa, Artificial sequence
  synthetic peptide
FGKESILFHYTDWVD

SEQ ID NO: 5737 - protein, 15 aa, Artificial sequence
  synthetic peptide
GKESILFHYTDWVDD

SEQ ID NO: 5738 - protein, 15 aa, Artificial sequence
  synthetic peptide
KESILFHYTDWVDDQ

SEQ ID NO: 5739 - protein, 15 aa, Artificial sequence
  synthetic peptide
ESILFHYTDWVDDQR

SEQ ID NO: 5740 - protein, 15 aa, Artificial sequence
  synthetic peptide
SILFHYTDWVDDQRP

SEQ ID NO: 5741 - protein, 15 aa, Artificial sequence
  synthetic peptide
ILFHYTDWVDDQRPE

SEQ ID NO: 5742 - protein, 15 aa, Artificial sequence
  synthetic peptide
LFHYTDWVDDQRPEN

SEQ ID NO: 5743 - protein, 15 aa, Artificial sequence
  synthetic peptide
FHYTDWVDDQRPENY

SEQ ID NO: 5744 - protein, 15 aa, Artificial sequence
  synthetic peptide
HYTDWVDDQRPENYR

SEQ ID NO: 5745 - protein, 15 aa, Artificial sequence
  synthetic peptide
YTDWVDDQRPENYRE

SEQ ID NO: 5746 - protein, 15 aa, Artificial sequence
  synthetic peptide
TDWVDDQRPENYREA

SEQ ID NO: 5747 - protein, 15 aa, Artificial sequence
  synthetic peptide
DWVDDQRPENYREAL

SEQ ID NO: 5748 - protein, 15 aa, Artificial sequence
  synthetic peptide
WVDDQRPENYREALG

SEQ ID NO: 5749 - protein, 15 aa, Artificial sequence
  synthetic peptide
VDDQRPENYREALGD

SEQ ID NO: 5750 - protein, 15 aa, Artificial sequence
  synthetic peptide
DDQRPENYREALGDV

SEQ ID NO: 5751 - protein, 15 aa, Artificial sequence
  synthetic peptide
DQRPENYREALGDVV

SEQ ID NO: 5752 - protein, 15 aa, Artificial sequence
  synthetic peptide
QRPENYREALGDVVG

SEQ ID NO: 5753 - protein, 15 aa, Artificial sequence
  synthetic peptide
RPENYREALGDVVGD

SEQ ID NO: 5754 - protein, 15 aa, Artificial sequence
  synthetic peptide
PENYREALGDVVGDY

SEQ ID NO: 5755 - protein, 15 aa, Artificial sequence
  synthetic peptide
ENYREALGDVVGDYN

SEQ ID NO: 5756 - protein, 15 aa, Artificial sequence
  synthetic peptide
NYREALGDVVGDYNF

SEQ ID NO: 5757 - protein, 15 aa, Artificial sequence
  synthetic peptide
YREALGDVVGDYNFI

SEQ ID NO: 5758 - protein, 15 aa, Artificial sequence
  synthetic peptide
REALGDVVGDYNFIC

SEQ ID NO: 5759 - protein, 15 aa, Artificial sequence
  synthetic peptide
EALGDVVGDYNFICP

SEQ ID NO: 5760 - protein, 15 aa, Artificial sequence
  synthetic peptide
ALGDVVGDYNFICPA

SEQ ID NO: 5761 - protein, 15 aa, Artificial sequence
  synthetic peptide
LGDVVGDYNFICPAL

SEQ ID NO: 5762 - protein, 15 aa, Artificial sequence
  synthetic peptide
GDVVGDYNFICPALE

SEQ ID NO: 5763 - protein, 15 aa, Artificial sequence
  synthetic peptide
DVVGDYNFICPALEF

SEQ ID NO: 5764 - protein, 15 aa, Artificial sequence
  synthetic peptide
VVGDYNFICPALEFT

SEQ ID NO: 5765 - protein, 15 aa, Artificial sequence
  synthetic peptide
VGDYNFICPALEFTK

SEQ ID NO: 5766 - protein, 15 aa, Artificial sequence
  synthetic peptide
GDYNFICPALEFTKK

SEQ ID NO: 5767 - protein, 15 aa, Artificial sequence
  synthetic peptide
DYNFICPALEFTKKF

SEQ ID NO: 5768 - protein, 15 aa, Artificial sequence
  synthetic peptide
YNFICPALEFTKKFS

SEQ ID NO: 5769 - protein, 15 aa, Artificial sequence
  synthetic peptide
NFICPALEFTKKFSE

SEQ ID NO: 5770 - protein, 15 aa, Artificial sequence
  synthetic peptide
FICPALEFTKKFSEW

SEQ ID NO: 5771 - protein, 15 aa, Artificial sequence
  synthetic peptide
ICPALEFTKKFSEWG

SEQ ID NO: 5772 - protein, 15 aa, Artificial sequence
  synthetic peptide
CPALEFTKKFSEWGN

SEQ ID NO: 5773 - protein, 15 aa, Artificial sequence
  synthetic peptide
PALEFTKKFSEWGNN

SEQ ID NO: 5774 - protein, 15 aa, Artificial sequence
  synthetic peptide
ALEFTKKFSEWGNNA

SEQ ID NO: 5775 - protein, 15 aa, Artificial sequence
  synthetic peptide
LEFTKKFSEWGNNAF

SEQ ID NO: 5776 - protein, 15 aa, Artificial sequence
  synthetic peptide
EFTKKFSEWGNNAFF

SEQ ID NO: 5777 - protein, 15 aa, Artificial sequence
  synthetic peptide
FTKKFSEWGNNAFFY

SEQ ID NO: 5778 - protein, 15 aa, Artificial sequence
  synthetic peptide
TKKFSEWGNNAFFYY

SEQ ID NO: 5779 - protein, 15 aa, Artificial sequence
  synthetic peptide
KKFSEWGNNAFFYYF

SEQ ID NO: 5780 - protein, 15 aa, Artificial sequence
  synthetic peptide
KFSEWGNNAFFYYFE

SEQ ID NO: 5781 - protein, 15 aa, Artificial sequence
  synthetic peptide
FSEWGNNAFFYYFEH

SEQ ID NO: 5782 - protein, 15 aa, Artificial sequence
  synthetic peptide
SEWGNNAFFYYFEHR

SEQ ID NO: 5783 - protein, 15 aa, Artificial sequence
  synthetic peptide
EWGNNAFFYYFEHRS

SEQ ID NO: 5784 - protein, 15 aa, Artificial sequence
  synthetic peptide
WGNNAFFYYFEHRSS

SEQ ID NO: 5785 - protein, 15 aa, Artificial sequence
  synthetic peptide
GNNAFFYYFEHRSSK

SEQ ID NO: 5786 - protein, 15 aa, Artificial sequence
  synthetic peptide
NNAFFYYFEHRSSKL

SEQ ID NO: 5787 - protein, 15 aa, Artificial sequence
  synthetic peptide
NAFFYYFEHRSSKLP

SEQ ID NO: 5788 - protein, 15 aa, Artificial sequence
  synthetic peptide
AFFYYFEHRSSKLPW

SEQ ID NO: 5789 - protein, 15 aa, Artificial sequence
  synthetic peptide
FFYYFEHRSSKLPWP

SEQ ID NO: 5790 - protein, 15 aa, Artificial sequence
  synthetic peptide
FYYFEHRSSKLPWPE

SEQ ID NO: 5791 - protein, 15 aa, Artificial sequence
  synthetic peptide
YYFEHRSSKLPWPEW

SEQ ID NO: 5792 - protein, 15 aa, Artificial sequence
  synthetic peptide
YFEHRSSKLPWPEWM

SEQ ID NO: 5793 - protein, 15 aa, Artificial sequence
  synthetic peptide
FEHRSSKLPWPEWMG

SEQ ID NO: 5794 - protein, 15 aa, Artificial sequence
  synthetic peptide
EHRSSKLPWPEWMGV

SEQ ID NO: 5795 - protein, 15 aa, Artificial sequence
  synthetic peptide
HRSSKLPWPEWMGVM

SEQ ID NO: 5796 - protein, 15 aa, Artificial sequence
  synthetic peptide
RSSKLPWPEWMGVMH

SEQ ID NO: 5797 - protein, 15 aa, Artificial sequence
  synthetic peptide
SSKLPWPEWMGVMHG

SEQ ID NO: 5798 - protein, 15 aa, Artificial sequence
  synthetic peptide
SKLPWPEWMGVMHGY

SEQ ID NO: 5799 - protein, 15 aa, Artificial sequence
  synthetic peptide
KLPWPEWMGVMHGYE

SEQ ID NO: 5800 - protein, 15 aa, Artificial sequence
  synthetic peptide
LPWPEWMGVMHGYEI

SEQ ID NO: 5801 - protein, 15 aa, Artificial sequence
  synthetic peptide
PWPEWMGVMHGYEIE

SEQ ID NO: 5802 - protein, 15 aa, Artificial sequence
  synthetic peptide
WPEWMGVMHGYEIEF

SEQ ID NO: 5803 - protein, 15 aa, Artificial sequence
  synthetic peptide
PEWMGVMHGYEIEFV

SEQ ID NO: 5804 - protein, 15 aa, Artificial sequence
  synthetic peptide
EWMGVMHGYEIEFVF

SEQ ID NO: 5805 - protein, 15 aa, Artificial sequence
  synthetic peptide
WMGVMHGYEIEFVFG

SEQ ID NO: 5806 - protein, 15 aa, Artificial sequence
  synthetic peptide
MGVMHGYEIEFVFGL

SEQ ID NO: 5807 - protein, 15 aa, Artificial sequence
  synthetic peptide
GVMHGYEIEFVFGLP

SEQ ID NO: 5808 - protein, 15 aa, Artificial sequence
  synthetic peptide
VMHGYEIEFVFGLPL

SEQ ID NO: 5809 - protein, 15 aa, Artificial sequence
  synthetic peptide
MHGYEIEFVFGLPLE

SEQ ID NO: 5810 - protein, 15 aa, Artificial sequence
  synthetic peptide
HGYEIEFVFGLPLER

SEQ ID NO: 5811 - protein, 15 aa, Artificial sequence
  synthetic peptide
GYEIEFVFGLPLERR

SEQ ID NO: 5812 - protein, 15 aa, Artificial sequence
  synthetic peptide
YEIEFVFGLPLERRD

SEQ ID NO: 5813 - protein, 15 aa, Artificial sequence
  synthetic peptide
EIEFVFGLPLERRDN

SEQ ID NO: 5814 - protein, 15 aa, Artificial sequence
  synthetic peptide
IEFVFGLPLERRDNY

SEQ ID NO: 5815 - protein, 15 aa, Artificial sequence
  synthetic peptide
EFVFGLPLERRDNYT

SEQ ID NO: 5816 - protein, 15 aa, Artificial sequence
  synthetic peptide
FVFGLPLERRDNYTK

SEQ ID NO: 5817 - protein, 15 aa, Artificial sequence
  synthetic peptide
VFGLPLERRDNYTKA

SEQ ID NO: 5818 - protein, 15 aa, Artificial sequence
  synthetic peptide
FGLPLERRDNYTKAE

SEQ ID NO: 5819 - protein, 15 aa, Artificial sequence
  synthetic peptide
GLPLERRDNYTKAEE

SEQ ID NO: 5820 - protein, 15 aa, Artificial sequence
  synthetic peptide
LPLERRDNYTKAEEI

SEQ ID NO: 5821 - protein, 15 aa, Artificial sequence
  synthetic peptide
PLERRDNYTKAEEIL

SEQ ID NO: 5822 - protein, 15 aa, Artificial sequence
  synthetic peptide
LERRDNYTKAEEILS

SEQ ID NO: 5823 - protein, 15 aa, Artificial sequence
  synthetic peptide
ERRDNYTKAEEILSR

SEQ ID NO: 5824 - protein, 15 aa, Artificial sequence
  synthetic peptide
RRDNYTKAEEILSRS

SEQ ID NO: 5825 - protein, 15 aa, Artificial sequence
  synthetic peptide
RDNYTKAEEILSRSI

SEQ ID NO: 5826 - protein, 15 aa, Artificial sequence
  synthetic peptide
DNYTKAEEILSRSIV

SEQ ID NO: 5827 - protein, 15 aa, Artificial sequence
  synthetic peptide
NYTKAEEILSRSIVK

SEQ ID NO: 5828 - protein, 15 aa, Artificial sequence
  synthetic peptide
YTKAEEILSRSIVKR

SEQ ID NO: 5829 - protein, 15 aa, Artificial sequence
  synthetic peptide
TKAEEILSRSIVKRW

SEQ ID NO: 5830 - protein, 15 aa, Artificial sequence
  synthetic peptide
KAEEILSRSIVKRWA

SEQ ID NO: 5831 - protein, 15 aa, Artificial sequence
  synthetic peptide
AEEILSRSIVKRWAN

SEQ ID NO: 5832 - protein, 15 aa, Artificial sequence
  synthetic peptide
EEILSRSIVKRWANF

SEQ ID NO: 5833 - protein, 15 aa, Artificial sequence
  synthetic peptide
EILSRSIVKRWANFA

SEQ ID NO: 5834 - protein, 15 aa, Artificial sequence
  synthetic peptide
ILSRSIVKRWANFAK

SEQ ID NO: 5835 - protein, 15 aa, Artificial sequence
  synthetic peptide
LSRSIVKRWANFAKY

SEQ ID NO: 5836 - protein, 15 aa, Artificial sequence
  synthetic peptide
SRSIVKRWANFAKYG

SEQ ID NO: 5837 - protein, 15 aa, Artificial sequence
  synthetic peptide
RSIVKRWANFAKYGN

SEQ ID NO: 5838 - protein, 15 aa, Artificial sequence
  synthetic peptide
SIVKRWANFAKYGNP

SEQ ID NO: 5839 - protein, 15 aa, Artificial sequence
  synthetic peptide
IVKRWANFAKYGNPN

SEQ ID NO: 5840 - protein, 15 aa, Artificial sequence
  synthetic peptide
VKRWANFAKYGNPNE

SEQ ID NO: 5841 - protein, 15 aa, Artificial sequence
  synthetic peptide
KRWANFAKYGNPNET

SEQ ID NO: 5842 - protein, 15 aa, Artificial sequence
  synthetic peptide
RWANFAKYGNPNETQ

SEQ ID NO: 5843 - protein, 15 aa, Artificial sequence
  synthetic peptide
WANFAKYGNPNETQN

SEQ ID NO: 5844 - protein, 15 aa, Artificial sequence
  synthetic peptide
ANFAKYGNPNETQNN

SEQ ID NO: 5845 - protein, 15 aa, Artificial sequence
  synthetic peptide
NFAKYGNPNETQNNS

SEQ ID NO: 5846 - protein, 15 aa, Artificial sequence
  synthetic peptide
FAKYGNPNETQNNST

SEQ ID NO: 5847 - protein, 15 aa, Artificial sequence
  synthetic peptide
AKYGNPNETQNNSTS

SEQ ID NO: 5848 - protein, 15 aa, Artificial sequence
  synthetic peptide
KYGNPNETQNNSTSW

SEQ ID NO: 5849 - protein, 15 aa, Artificial sequence
  synthetic peptide
YGNPNETQNNSTSWP

SEQ ID NO: 5850 - protein, 15 aa, Artificial sequence
  synthetic peptide
GNPNETQNNSTSWPV

SEQ ID NO: 5851 - protein, 15 aa, Artificial sequence
  synthetic peptide
NPNETQNNSTSWPVF

SEQ ID NO: 5852 - protein, 15 aa, Artificial sequence
  synthetic peptide
PNETQNNSTSWPVFK

SEQ ID NO: 5853 - protein, 15 aa, Artificial sequence
  synthetic peptide
NETQNNSTSWPVFKS

SEQ ID NO: 5854 - protein, 15 aa, Artificial sequence
  synthetic peptide
ETQNNSTSWPVFKST

SEQ ID NO: 5855 - protein, 15 aa, Artificial sequence
  synthetic peptide
TQNNSTSWPVFKSTE

SEQ ID NO: 5856 - protein, 15 aa, Artificial sequence
  synthetic peptide
QNNSTSWPVFKSTEQ

SEQ ID NO: 5857 - protein, 15 aa, Artificial sequence
  synthetic peptide
NNSTSWPVFKSTEQK

SEQ ID NO: 5858 - protein, 15 aa, Artificial sequence
  synthetic peptide
NSTSWPVFKSTEQKY

SEQ ID NO: 5859 - protein, 15 aa, Artificial sequence
  synthetic peptide
STSWPVFKSTEQKYL

SEQ ID NO: 5860 - protein, 15 aa, Artificial sequence
  synthetic peptide
TSWPVFKSTEQKYLT

SEQ ID NO: 5861 - protein, 15 aa, Artificial sequence
  synthetic peptide
SWPVFKSTEQKYLTL

SEQ ID NO: 5862 - protein, 15 aa, Artificial sequence
  synthetic peptide
WPVFKSTEQKYLTLN

SEQ ID NO: 5863 - protein, 15 aa, Artificial sequence
  synthetic peptide
PVFKSTEQKYLTLNT

SEQ ID NO: 5864 - protein, 15 aa, Artificial sequence
  synthetic peptide
VFKSTEQKYLTLNTE

SEQ ID NO: 5865 - protein, 15 aa, Artificial sequence
  synthetic peptide
FKSTEQKYLTLNTES

SEQ ID NO: 5866 - protein, 15 aa, Artificial sequence
  synthetic peptide
KSTEQKYLTLNTEST

SEQ ID NO: 5867 - protein, 15 aa, Artificial sequence
  synthetic peptide
STEQKYLTLNTESTR

SEQ ID NO: 5868 - protein, 15 aa, Artificial sequence
  synthetic peptide
TEQKYLTLNTESTRI

SEQ ID NO: 5869 - protein, 15 aa, Artificial sequence
  synthetic peptide
EQKYLTLNTESTRIM

SEQ ID NO: 5870 - protein, 15 aa, Artificial sequence
  synthetic peptide
QKYLTLNTESTRIMT

SEQ ID NO: 5871 - protein, 15 aa, Artificial sequence
  synthetic peptide
KYLTLNTESTRIMTK

SEQ ID NO: 5872 - protein, 15 aa, Artificial sequence
  synthetic peptide
YLTLNTESTRIMTKL

SEQ ID NO: 5873 - protein, 15 aa, Artificial sequence
  synthetic peptide
LTLNTESTRIMTKLR

SEQ ID NO: 5874 - protein, 15 aa, Artificial sequence
  synthetic peptide
TLNTESTRIMTKLRA

SEQ ID NO: 5875 - protein, 15 aa, Artificial sequence
  synthetic peptide
LNTESTRIMTKLRAQ

SEQ ID NO: 5876 - protein, 15 aa, Artificial sequence
  synthetic peptide
NTESTRIMTKLRAQQ

SEQ ID NO: 5877 - protein, 15 aa, Artificial sequence
  synthetic peptide
TESTRIMTKLRAQQC

SEQ ID NO: 5878 - protein, 15 aa, Artificial sequence
  synthetic peptide
ESTRIMTKLRAQQCR

SEQ ID NO: 5879 - protein, 15 aa, Artificial sequence
  synthetic peptide
STRIMTKLRAQQCRF

SEQ ID NO: 5880 - protein, 15 aa, Artificial sequence
  synthetic peptide
TRIMTKLRAQQCRFW

SEQ ID NO: 5881 - protein, 15 aa, Artificial sequence
  synthetic peptide
RIMTKLRAQQCRFWT

SEQ ID NO: 5882 - protein, 15 aa, Artificial sequence
  synthetic peptide
IMTKLRAQQCRFWTS

SEQ ID NO: 5883 - protein, 15 aa, Artificial sequence
  synthetic peptide
MTKLRAQQCRFWTSF

SEQ ID NO: 5884 - protein, 15 aa, Artificial sequence
  synthetic peptide
TKLRAQQCRFWTSFF

SEQ ID NO: 5885 - protein, 15 aa, Artificial sequence
  synthetic peptide
KLRAQQCRFWTSFFP

SEQ ID NO: 5886 - protein, 15 aa, Artificial sequence
  synthetic peptide
LRAQQCRFWTSFFPK

SEQ ID NO: 5887 - protein, 15 aa, Artificial sequence
  synthetic peptide
RAQQCRFWTSFFPKV

SEQ ID NO: 5888 - protein, 15 aa, Artificial sequence
  synthetic peptide
AQQCRFWTSFFPKVL

SEQ ID NO: 5889 - protein, 15 aa, Artificial sequence
  synthetic peptide
QQCRFWTSFFPKVLE

SEQ ID NO: 5890 - protein, 15 aa, Artificial sequence
  synthetic peptide
QCRFWTSFFPKVLEM

SEQ ID NO: 5891 - protein, 15 aa, Artificial sequence
  synthetic peptide
CRFWTSFFPKVLEMT

SEQ ID NO: 5892 - protein, 15 aa, Artificial sequence
  synthetic peptide
RFWTSFFPKVLEMTG

SEQ ID NO: 5893 - protein, 15 aa, Artificial sequence
  synthetic peptide
FWTSFFPKVLEMTGN

SEQ ID NO: 5894 - protein, 15 aa, Artificial sequence
  synthetic peptide
WTSFFPKVLEMTGNI

SEQ ID NO: 5895 - protein, 15 aa, Artificial sequence
  synthetic peptide
TSFFPKVLEMTGNID

SEQ ID NO: 5896 - protein, 15 aa, Artificial sequence
  synthetic peptide
SFFPKVLEMTGNIDE

SEQ ID NO: 5897 - protein, 15 aa, Artificial sequence
  synthetic peptide
FFPKVLEMTGNIDEA

SEQ ID NO: 5898 - protein, 15 aa, Artificial sequence
  synthetic peptide
FPKVLEMTGNIDEAE

SEQ ID NO: 5899 - protein, 15 aa, Artificial sequence
  synthetic peptide
PKVLEMTGNIDEAEW

SEQ ID NO: 5900 - protein, 15 aa, Artificial sequence
  synthetic peptide
KVLEMTGNIDEAEWE

SEQ ID NO: 5901 - protein, 15 aa, Artificial sequence
  synthetic peptide
VLEMTGNIDEAEWEW

SEQ ID NO: 5902 - protein, 15 aa, Artificial sequence
  synthetic peptide
LEMTGNIDEAEWEWK

SEQ ID NO: 5903 - protein, 15 aa, Artificial sequence
  synthetic peptide
EMTGNIDEAEWEWKA

SEQ ID NO: 5904 - protein, 15 aa, Artificial sequence
  synthetic peptide
MTGNIDEAEWEWKAG

SEQ ID NO: 5905 - protein, 15 aa, Artificial sequence
  synthetic peptide
TGNIDEAEWEWKAGF

SEQ ID NO: 5906 - protein, 15 aa, Artificial sequence
  synthetic peptide
GNIDEAEWEWKAGFH

SEQ ID NO: 5907 - protein, 15 aa, Artificial sequence
  synthetic peptide
NIDEAEWEWKAGFHR

SEQ ID NO: 5908 - protein, 15 aa, Artificial sequence
  synthetic peptide
IDEAEWEWKAGFHRW

SEQ ID NO: 5909 - protein, 15 aa, Artificial sequence
  synthetic peptide
DEAEWEWKAGFHRWN

SEQ ID NO: 5910 - protein, 15 aa, Artificial sequence
  synthetic peptide
EAEWEWKAGFHRWNN

SEQ ID NO: 5911 - protein, 15 aa, Artificial sequence
  synthetic peptide
AEWEWKAGFHRWNNY

SEQ ID NO: 5912 - protein, 15 aa, Artificial sequence
  synthetic peptide
EWEWKAGFHRWNNYM

SEQ ID NO: 5913 - protein, 15 aa, Artificial sequence
  synthetic peptide
WEWKAGFHRWNNYMM

SEQ ID NO: 5914 - protein, 15 aa, Artificial sequence
  synthetic peptide
EWKAGFHRWNNYMMD

SEQ ID NO: 5915 - protein, 15 aa, Artificial sequence
  synthetic peptide
WKAGFHRWNNYMMDW

SEQ ID NO: 5916 - protein, 15 aa, Artificial sequence
  synthetic peptide
KAGFHRWNNYMMDWK

SEQ ID NO: 5917 - protein, 15 aa, Artificial sequence
  synthetic peptide
AGFHRWNNYMMDWKN

SEQ ID NO: 5918 - protein, 15 aa, Artificial sequence
  synthetic peptide
GFHRWNNYMMDWKNQ

SEQ ID NO: 5919 - protein, 15 aa, Artificial sequence
  synthetic peptide
FHRWNNYMMDWKNQF

SEQ ID NO: 5920 - protein, 15 aa, Artificial sequence
  synthetic peptide
HRWNNYMMDWKNQFN

SEQ ID NO: 5921 - protein, 15 aa, Artificial sequence
  synthetic peptide
RWNNYMMDWKNQFND

SEQ ID NO: 5922 - protein, 15 aa, Artificial sequence
  synthetic peptide
WNNYMMDWKNQFNDY

SEQ ID NO: 5923 - protein, 15 aa, Artificial sequence
  synthetic peptide
NNYMMDWKNQFNDYT

SEQ ID NO: 5924 - protein, 15 aa, Artificial sequence
  synthetic peptide
NYMMDWKNQFNDYTS

SEQ ID NO: 5925 - protein, 15 aa, Artificial sequence
  synthetic peptide
YMMDWKNQFNDYTSK

SEQ ID NO: 5926 - protein, 15 aa, Artificial sequence
  synthetic peptide
MMDWKNQFNDYTSKK

SEQ ID NO: 5927 - protein, 15 aa, Artificial sequence
  synthetic peptide
MDWKNQFNDYTSKKE

SEQ ID NO: 5928 - protein, 15 aa, Artificial sequence
  synthetic peptide
DWKNQFNDYTSKKES

SEQ ID NO: 5929 - protein, 15 aa, Artificial sequence
  synthetic peptide
WKNQFNDYTSKKESC

SEQ ID NO: 5930 - protein, 15 aa, Artificial sequence
  synthetic peptide
KNQFNDYTSKKESCV

SEQ ID NO: 5931 - protein, 15 aa, Artificial sequence
  synthetic peptide
NQFNDYTSKKESCVG

SEQ ID NO: 5932 - protein, 15 aa, Artificial sequence
  synthetic peptide
QFNDYTSKKESCVGL

SEQ ID NO: 5933 - protein, 16 aa, Artificial sequence
  synthetic peptide
MHSKVTIICIRFLFWF

SEQ ID NO: 5934 - protein, 16 aa, Artificial sequence
  synthetic peptide
HSKVTIICIRFLFWFL

SEQ ID NO: 5935 - protein, 16 aa, Artificial sequence
  synthetic peptide
SKVTIICIRFLFWFLL

SEQ ID NO: 5936 - protein, 16 aa, Artificial sequence
  synthetic peptide
KVTIICIRFLFWFLLL

SEQ ID NO: 5937 - protein, 16 aa, Artificial sequence
  synthetic peptide
VTIICIRFLFWFLLLC

SEQ ID NO: 5938 - protein, 16 aa, Artificial sequence
  synthetic peptide
TIICIRFLFWFLLLCM

SEQ ID NO: 5939 - protein, 16 aa, Artificial sequence
  synthetic peptide
IICIRFLFWFLLLCML

SEQ ID NO: 5940 - protein, 16 aa, Artificial sequence
  synthetic peptide
ICIRFLFWFLLLCMLI

SEQ ID NO: 5941 - protein, 16 aa, Artificial sequence
  synthetic peptide
CIRFLFWFLLLCMLIG

SEQ ID NO: 5942 - protein, 16 aa, Artificial sequence
  synthetic peptide
IRFLFWFLLLCMLIGK

SEQ ID NO: 5943 - protein, 16 aa, Artificial sequence
  synthetic peptide
RFLFWFLLLCMLIGKS

SEQ ID NO: 5944 - protein, 16 aa, Artificial sequence
  synthetic peptide
FLFWFLLLCMLIGKSH

SEQ ID NO: 5945 - protein, 16 aa, Artificial sequence
  synthetic peptide
LFWFLLLCMLIGKSHT

SEQ ID NO: 5946 - protein, 16 aa, Artificial sequence
  synthetic peptide
FWFLLLCMLIGKSHTE

SEQ ID NO: 5947 - protein, 16 aa, Artificial sequence
  synthetic peptide
WFLLLCMLIGKSHTED

SEQ ID NO: 5948 - protein, 16 aa, Artificial sequence
  synthetic peptide
FLLLCMLIGKSHTEDD

SEQ ID NO: 5949 - protein, 16 aa, Artificial sequence
  synthetic peptide
LLLCMLIGKSHTEDDI

SEQ ID NO: 5950 - protein, 16 aa, Artificial sequence
  synthetic peptide
LLCMLIGKSHTEDDII

SEQ ID NO: 5951 - protein, 16 aa, Artificial sequence
  synthetic peptide
LCMLIGKSHTEDDIII

SEQ ID NO: 5952 - protein, 16 aa, Artificial sequence
  synthetic peptide
CMLIGKSHTEDDIIIA

SEQ ID NO: 5953 - protein, 16 aa, Artificial sequence
  synthetic peptide
MLIGKSHTEDDIIIAT

SEQ ID NO: 5954 - protein, 16 aa, Artificial sequence
  synthetic peptide
LIGKSHTEDDIIIATK

SEQ ID NO: 5955 - protein, 16 aa, Artificial sequence
  synthetic peptide
IGKSHTEDDIIIATKN

SEQ ID NO: 5956 - protein, 16 aa, Artificial sequence
  synthetic peptide
GKSHTEDDIIIATKNG

SEQ ID NO: 5957 - protein, 16 aa, Artificial sequence
  synthetic peptide
KSHTEDDIIIATKNGK

SEQ ID NO: 5958 - protein, 16 aa, Artificial sequence
  synthetic peptide
SHTEDDIIIATKNGKV

SEQ ID NO: 5959 - protein, 16 aa, Artificial sequence
  synthetic peptide
HTEDDIIIATKNGKVR

SEQ ID NO: 5960 - protein, 16 aa, Artificial sequence
  synthetic peptide
TEDDIIIATKNGKVRG

SEQ ID NO: 5961 - protein, 16 aa, Artificial sequence
  synthetic peptide
EDDIIIATKNGKVRGM

SEQ ID NO: 5962 - protein, 16 aa, Artificial sequence
  synthetic peptide
DDIIIATKNGKVRGMN

SEQ ID NO: 5963 - protein, 16 aa, Artificial sequence
  synthetic peptide
DIIIATKNGKVRGMNL

SEQ ID NO: 5964 - protein, 16 aa, Artificial sequence
  synthetic peptide
IIIATKNGKVRGMNLT

SEQ ID NO: 5965 - protein, 16 aa, Artificial sequence
  synthetic peptide
IIATKNGKVRGMNLTV

SEQ ID NO: 5966 - protein, 16 aa, Artificial sequence
  synthetic peptide
IATKNGKVRGMNLTVF

SEQ ID NO: 5967 - protein, 16 aa, Artificial sequence
  synthetic peptide
ATKNGKVRGMNLTVFG

SEQ ID NO: 5968 - protein, 16 aa, Artificial sequence
  synthetic peptide
TKNGKVRGMNLTVFGG

SEQ ID NO: 5969 - protein, 16 aa, Artificial sequence
  synthetic peptide
KNGKVRGMNLTVFGGT

SEQ ID NO: 5970 - protein, 16 aa, Artificial sequence
  synthetic peptide
NGKVRGMNLTVFGGTV

SEQ ID NO: 5971 - protein, 16 aa, Artificial sequence
  synthetic peptide
GKVRGMNLTVFGGTVT

SEQ ID NO: 5972 - protein, 16 aa, Artificial sequence
  synthetic peptide
KVRGMNLTVFGGTVTA

SEQ ID NO: 5973 - protein, 16 aa, Artificial sequence
  synthetic peptide
VRGMNLTVFGGTVTAF

SEQ ID NO: 5974 - protein, 16 aa, Artificial sequence
  synthetic peptide
RGMNLTVFGGTVTAFL

SEQ ID NO: 5975 - protein, 16 aa, Artificial sequence
  synthetic peptide
GMNLTVFGGTVTAFLG

SEQ ID NO: 5976 - protein, 16 aa, Artificial sequence
  synthetic peptide
MNLTVFGGTVTAFLGI

SEQ ID NO: 5977 - protein, 16 aa, Artificial sequence
  synthetic peptide
NLTVFGGTVTAFLGIP

SEQ ID NO: 5978 - protein, 16 aa, Artificial sequence
  synthetic peptide
LTVFGGTVTAFLGIPY

SEQ ID NO: 5979 - protein, 16 aa, Artificial sequence
  synthetic peptide
TVFGGTVTAFLGIPYA

SEQ ID NO: 5980 - protein, 16 aa, Artificial sequence
  synthetic peptide
VFGGTVTAFLGIPYAQ

SEQ ID NO: 5981 - protein, 16 aa, Artificial sequence
  synthetic peptide
FGGTVTAFLGIPYAQP

SEQ ID NO: 5982 - protein, 16 aa, Artificial sequence
  synthetic peptide
GGTVTAFLGIPYAQPP

SEQ ID NO: 5983 - protein, 16 aa, Artificial sequence
  synthetic peptide
GTVTAFLGIPYAQPPL

SEQ ID NO: 5984 - protein, 16 aa, Artificial sequence
  synthetic peptide
TVTAFLGIPYAQPPLG

SEQ ID NO: 5985 - protein, 16 aa, Artificial sequence
  synthetic peptide
VTAFLGIPYAQPPLGR

SEQ ID NO: 5986 - protein, 16 aa, Artificial sequence
  synthetic peptide
TAFLGIPYAQPPLGRL

SEQ ID NO: 5987 - protein, 16 aa, Artificial sequence
  synthetic peptide
AFLGIPYAQPPLGRLR

SEQ ID NO: 5988 - protein, 16 aa, Artificial sequence
  synthetic peptide
FLGIPYAQPPLGRLRF

SEQ ID NO: 5989 - protein, 16 aa, Artificial sequence
  synthetic peptide
LGIPYAQPPLGRLRFK

SEQ ID NO: 5990 - protein, 16 aa, Artificial sequence
  synthetic peptide
GIPYAQPPLGRLRFKK

SEQ ID NO: 5991 - protein, 16 aa, Artificial sequence
  synthetic peptide
IPYAQPPLGRLRFKKP

SEQ ID NO: 5992 - protein, 16 aa, Artificial sequence
  synthetic peptide
PYAQPPLGRLRFKKPQ

SEQ ID NO: 5993 - protein, 16 aa, Artificial sequence
  synthetic peptide
YAQPPLGRLRFKKPQS

SEQ ID NO: 5994 - protein, 16 aa, Artificial sequence
  synthetic peptide
AQPPLGRLRFKKPQSL

SEQ ID NO: 5995 - protein, 16 aa, Artificial sequence
  synthetic peptide
QPPLGRLRFKKPQSLT

SEQ ID NO: 5996 - protein, 16 aa, Artificial sequence
  synthetic peptide
PPLGRLRFKKPQSLTK

SEQ ID NO: 5997 - protein, 16 aa, Artificial sequence
  synthetic peptide
PLGRLRFKKPQSLTKW

SEQ ID NO: 5998 - protein, 16 aa, Artificial sequence
  synthetic peptide
LGRLRFKKPQSLTKWS

SEQ ID NO: 5999 - protein, 16 aa, Artificial sequence
  synthetic peptide
GRLRFKKPQSLTKWSD

SEQ ID NO: 6000 - protein, 16 aa, Artificial sequence
  synthetic peptide
RLRFKKPQSLTKWSDI

SEQ ID NO: 6001 - protein, 16 aa, Artificial sequence
  synthetic peptide
LRFKKPQSLTKWSDIW

SEQ ID NO: 6002 - protein, 16 aa, Artificial sequence
  synthetic peptide
RFKKPQSLTKWSDIWN

SEQ ID NO: 6003 - protein, 16 aa, Artificial sequence
  synthetic peptide
FKKPQSLTKWSDIWNA

SEQ ID NO: 6004 - protein, 16 aa, Artificial sequence
  synthetic peptide
KKPQSLTKWSDIWNAT

SEQ ID NO: 6005 - protein, 16 aa, Artificial sequence
  synthetic peptide
KPQSLTKWSDIWNATK

SEQ ID NO: 6006 - protein, 16 aa, Artificial sequence
  synthetic peptide
PQSLTKWSDIWNATKY

SEQ ID NO: 6007 - protein, 16 aa, Artificial sequence
  synthetic peptide
QSLTKWSDIWNATKYA

SEQ ID NO: 6008 - protein, 16 aa, Artificial sequence
  synthetic peptide
SLTKWSDIWNATKYAN

SEQ ID NO: 6009 - protein, 16 aa, Artificial sequence
  synthetic peptide
LTKWSDIWNATKYANS

SEQ ID NO: 6010 - protein, 16 aa, Artificial sequence
  synthetic peptide
TKWSDIWNATKYANSC

SEQ ID NO: 6011 - protein, 16 aa, Artificial sequence
  synthetic peptide
KWSDIWNATKYANSCC

SEQ ID NO: 6012 - protein, 16 aa, Artificial sequence
  synthetic peptide
WSDIWNATKYANSCCQ

SEQ ID NO: 6013 - protein, 16 aa, Artificial sequence
  synthetic peptide
SDIWNATKYANSCCQN

SEQ ID NO: 6014 - protein, 16 aa, Artificial sequence
  synthetic peptide
DIWNATKYANSCCQNI

SEQ ID NO: 6015 - protein, 16 aa, Artificial sequence
  synthetic peptide
IWNATKYANSCCQNID

SEQ ID NO: 6016 - protein, 16 aa, Artificial sequence
  synthetic peptide
WNATKYANSCCQNIDQ

SEQ ID NO: 6017 - protein, 16 aa, Artificial sequence
  synthetic peptide
NATKYANSCCQNIDQS

SEQ ID NO: 6018 - protein, 16 aa, Artificial sequence
  synthetic peptide
ATKYANSCCQNIDQSF

SEQ ID NO: 6019 - protein, 16 aa, Artificial sequence
  synthetic peptide
TKYANSCCQNIDQSFP

SEQ ID NO: 6020 - protein, 16 aa, Artificial sequence
  synthetic peptide
KYANSCCQNIDQSFPG

SEQ ID NO: 6021 - protein, 16 aa, Artificial sequence
  synthetic peptide
YANSCCQNIDQSFPGF

SEQ ID NO: 6022 - protein, 16 aa, Artificial sequence
  synthetic peptide
ANSCCQNIDQSFPGFH

SEQ ID NO: 6023 - protein, 16 aa, Artificial sequence
  synthetic peptide
NSCCQNIDQSFPGFHG

SEQ ID NO: 6024 - protein, 16 aa, Artificial sequence
  synthetic peptide
SCCQNIDQSFPGFHGS

SEQ ID NO: 6025 - protein, 16 aa, Artificial sequence
  synthetic peptide
CCQNIDQSFPGFHGSE

SEQ ID NO: 6026 - protein, 16 aa, Artificial sequence
  synthetic peptide
CQNIDQSFPGFHGSEM

SEQ ID NO: 6027 - protein, 16 aa, Artificial sequence
  synthetic peptide
QNIDQSFPGFHGSEMW

SEQ ID NO: 6028 - protein, 16 aa, Artificial sequence
  synthetic peptide
NIDQSFPGFHGSEMWN

SEQ ID NO: 6029 - protein, 16 aa, Artificial sequence
  synthetic peptide
IDQSFPGFHGSEMWNP

SEQ ID NO: 6030 - protein, 16 aa, Artificial sequence
  synthetic peptide
DQSFPGFHGSEMWNPN

SEQ ID NO: 6031 - protein, 16 aa, Artificial sequence
  synthetic peptide
QSFPGFHGSEMWNPNT

SEQ ID NO: 6032 - protein, 16 aa, Artificial sequence
  synthetic peptide
SFPGFHGSEMWNPNTD

SEQ ID NO: 6033 - protein, 16 aa, Artificial sequence
  synthetic peptide
FPGFHGSEMWNPNTDL

SEQ ID NO: 6034 - protein, 16 aa, Artificial sequence
  synthetic peptide
PGFHGSEMWNPNTDLS

SEQ ID NO: 6035 - protein, 16 aa, Artificial sequence
  synthetic peptide
GFHGSEMWNPNTDLSE

SEQ ID NO: 6036 - protein, 16 aa, Artificial sequence
  synthetic peptide
FHGSEMWNPNTDLSED

SEQ ID NO: 6037 - protein, 16 aa, Artificial sequence
  synthetic peptide
HGSEMWNPNTDLSEDC

SEQ ID NO: 6038 - protein, 16 aa, Artificial sequence
  synthetic peptide
GSEMWNPNTDLSEDCL

SEQ ID NO: 6039 - protein, 16 aa, Artificial sequence
  synthetic peptide
SEMWNPNTDLSEDCLY

SEQ ID NO: 6040 - protein, 16 aa, Artificial sequence
  synthetic peptide
EMWNPNTDLSEDCLYL

SEQ ID NO: 6041 - protein, 16 aa, Artificial sequence
  synthetic peptide
MWNPNTDLSEDCLYLN

SEQ ID NO: 6042 - protein, 16 aa, Artificial sequence
  synthetic peptide
WNPNTDLSEDCLYLNV

SEQ ID NO: 6043 - protein, 16 aa, Artificial sequence
  synthetic peptide
NPNTDLSEDCLYLNVW

SEQ ID NO: 6044 - protein, 16 aa, Artificial sequence
  synthetic peptide
PNTDLSEDCLYLNVWI

SEQ ID NO: 6045 - protein, 16 aa, Artificial sequence
  synthetic peptide
NTDLSEDCLYLNVWIP

SEQ ID NO: 6046 - protein, 16 aa, Artificial sequence
  synthetic peptide
TDLSEDCLYLNVWIPA

SEQ ID NO: 6047 - protein, 16 aa, Artificial sequence
  synthetic peptide
DLSEDCLYLNVWIPAP

SEQ ID NO: 6048 - protein, 16 aa, Artificial sequence
  synthetic peptide
LSEDCLYLNVWIPAPK

SEQ ID NO: 6049 - protein, 16 aa, Artificial sequence
  synthetic peptide
SEDCLYLNVWIPAPKP

SEQ ID NO: 6050 - protein, 16 aa, Artificial sequence
  synthetic peptide
EDCLYLNVWIPAPKPK

SEQ ID NO: 6051 - protein, 16 aa, Artificial sequence
  synthetic peptide
DCLYLNVWIPAPKPKN

SEQ ID NO: 6052 - protein, 16 aa, Artificial sequence
  synthetic peptide
CLYLNVWIPAPKPKNA

SEQ ID NO: 6053 - protein, 16 aa, Artificial sequence
  synthetic peptide
LYLNVWIPAPKPKNAT

SEQ ID NO: 6054 - protein, 16 aa, Artificial sequence
  synthetic peptide
YLNVWIPAPKPKNATV

SEQ ID NO: 6055 - protein, 16 aa, Artificial sequence
  synthetic peptide
LNVWIPAPKPKNATVL

SEQ ID NO: 6056 - protein, 16 aa, Artificial sequence
  synthetic peptide
NVWIPAPKPKNATVLI

SEQ ID NO: 6057 - protein, 16 aa, Artificial sequence
  synthetic peptide
VWIPAPKPKNATVLIW

SEQ ID NO: 6058 - protein, 16 aa, Artificial sequence
  synthetic peptide
WIPAPKPKNATVLIWI

SEQ ID NO: 6059 - protein, 16 aa, Artificial sequence
  synthetic peptide
IPAPKPKNATVLIWIY

SEQ ID NO: 6060 - protein, 16 aa, Artificial sequence
  synthetic peptide
PAPKPKNATVLIWIYG

SEQ ID NO: 6061 - protein, 16 aa, Artificial sequence
  synthetic peptide
APKPKNATVLIWIYGG

SEQ ID NO: 6062 - protein, 16 aa, Artificial sequence
  synthetic peptide
PKPKNATVLIWIYGGG

SEQ ID NO: 6063 - protein, 16 aa, Artificial sequence
  synthetic peptide
KPKNATVLIWIYGGGF

SEQ ID NO: 6064 - protein, 16 aa, Artificial sequence
  synthetic peptide
PKNATVLIWIYGGGFQ

SEQ ID NO: 6065 - protein, 16 aa, Artificial sequence
  synthetic peptide
KNATVLIWIYGGGFQT

SEQ ID NO: 6066 - protein, 16 aa, Artificial sequence
  synthetic peptide
NATVLIWIYGGGFQTG

SEQ ID NO: 6067 - protein, 16 aa, Artificial sequence
  synthetic peptide
ATVLIWIYGGGFQTGT

SEQ ID NO: 6068 - protein, 16 aa, Artificial sequence
  synthetic peptide
TVLIWIYGGGFQTGTS

SEQ ID NO: 6069 - protein, 16 aa, Artificial sequence
  synthetic peptide
VLIWIYGGGFQTGTSS

SEQ ID NO: 6070 - protein, 16 aa, Artificial sequence
  synthetic peptide
LIWIYGGGFQTGTSSL

SEQ ID NO: 6071 - protein, 16 aa, Artificial sequence
  synthetic peptide
IWIYGGGFQTGTSSLH

SEQ ID NO: 6072 - protein, 16 aa, Artificial sequence
  synthetic peptide
WIYGGGFQTGTSSLHV

SEQ ID NO: 6073 - protein, 16 aa, Artificial sequence
  synthetic peptide
IYGGGFQTGTSSLHVY

SEQ ID NO: 6074 - protein, 16 aa, Artificial sequence
  synthetic peptide
YGGGFQTGTSSLHVYD

SEQ ID NO: 6075 - protein, 16 aa, Artificial sequence
  synthetic peptide
GGGFQTGTSSLHVYDG

SEQ ID NO: 6076 - protein, 16 aa, Artificial sequence
  synthetic peptide
GGFQTGTSSLHVYDGK

SEQ ID NO: 6077 - protein, 16 aa, Artificial sequence
  synthetic peptide
GFQTGTSSLHVYDGKF

SEQ ID NO: 6078 - protein, 16 aa, Artificial sequence
  synthetic peptide
FQTGTSSLHVYDGKFL

SEQ ID NO: 6079 - protein, 16 aa, Artificial sequence
  synthetic peptide
QTGTSSLHVYDGKFLA

SEQ ID NO: 6080 - protein, 16 aa, Artificial sequence
  synthetic peptide
TGTSSLHVYDGKFLAR

SEQ ID NO: 6081 - protein, 16 aa, Artificial sequence
  synthetic peptide
GTSSLHVYDGKFLARV

SEQ ID NO: 6082 - protein, 16 aa, Artificial sequence
  synthetic peptide
TSSLHVYDGKFLARVE

SEQ ID NO: 6083 - protein, 16 aa, Artificial sequence
  synthetic peptide
SSLHVYDGKFLARVER

SEQ ID NO: 6084 - protein, 16 aa, Artificial sequence
  synthetic peptide
SLHVYDGKFLARVERV

SEQ ID NO: 6085 - protein, 16 aa, Artificial sequence
  synthetic peptide
LHVYDGKFLARVERVI

SEQ ID NO: 6086 - protein, 16 aa, Artificial sequence
  synthetic peptide
HVYDGKFLARVERVIV

SEQ ID NO: 6087 - protein, 16 aa, Artificial sequence
  synthetic peptide
VYDGKFLARVERVIVV

SEQ ID NO: 6088 - protein, 16 aa, Artificial sequence
  synthetic peptide
YDGKFLARVERVIVVS

SEQ ID NO: 6089 - protein, 16 aa, Artificial sequence
  synthetic peptide
DGKFLARVERVIVVSM

SEQ ID NO: 6090 - protein, 16 aa, Artificial sequence
  synthetic peptide
GKFLARVERVIVVSMN

SEQ ID NO: 6091 - protein, 16 aa, Artificial sequence
  synthetic peptide
KFLARVERVIVVSMNY

SEQ ID NO: 6092 - protein, 16 aa, Artificial sequence
  synthetic peptide
FLARVERVIVVSMNYR

SEQ ID NO: 6093 - protein, 16 aa, Artificial sequence
  synthetic peptide
LARVERVIVVSMNYRV

SEQ ID NO: 6094 - protein, 16 aa, Artificial sequence
  synthetic peptide
ARVERVIVVSMNYRVG

SEQ ID NO: 6095 - protein, 16 aa, Artificial sequence
  synthetic peptide
RVERVIVVSMNYRVGA

SEQ ID NO: 6096 - protein, 16 aa, Artificial sequence
  synthetic peptide
VERVIVVSMNYRVGAL

SEQ ID NO: 6097 - protein, 16 aa, Artificial sequence
  synthetic peptide
ERVIVVSMNYRVGALG

SEQ ID NO: 6098 - protein, 16 aa, Artificial sequence
  synthetic peptide
RVIVVSMNYRVGALGF

SEQ ID NO: 6099 - protein, 16 aa, Artificial sequence
  synthetic peptide
VIVVSMNYRVGALGFL

SEQ ID NO: 6100 - protein, 16 aa, Artificial sequence
  synthetic peptide
IVVSMNYRVGALGFLA

SEQ ID NO: 6101 - protein, 16 aa, Artificial sequence
  synthetic peptide
VVSMNYRVGALGFLAL

SEQ ID NO: 6102 - protein, 16 aa, Artificial sequence
  synthetic peptide
VSMNYRVGALGFLALP

SEQ ID NO: 6103 - protein, 16 aa, Artificial sequence
  synthetic peptide
SMNYRVGALGFLALPG

SEQ ID NO: 6104 - protein, 16 aa, Artificial sequence
  synthetic peptide
MNYRVGALGFLALPGN

SEQ ID NO: 6105 - protein, 16 aa, Artificial sequence
  synthetic peptide
NYRVGALGFLALPGNP

SEQ ID NO: 6106 - protein, 16 aa, Artificial sequence
  synthetic peptide
YRVGALGFLALPGNPE

SEQ ID NO: 6107 - protein, 16 aa, Artificial sequence
  synthetic peptide
RVGALGFLALPGNPEA

SEQ ID NO: 6108 - protein, 16 aa, Artificial sequence
  synthetic peptide
VGALGFLALPGNPEAP

SEQ ID NO: 6109 - protein, 16 aa, Artificial sequence
  synthetic peptide
GALGFLALPGNPEAPG

SEQ ID NO: 6110 - protein, 16 aa, Artificial sequence
  synthetic peptide
ALGFLALPGNPEAPGN

SEQ ID NO: 6111 - protein, 16 aa, Artificial sequence
  synthetic peptide
LGFLALPGNPEAPGNM

SEQ ID NO: 6112 - protein, 16 aa, Artificial sequence
  synthetic peptide
GFLALPGNPEAPGNMG

SEQ ID NO: 6113 - protein, 16 aa, Artificial sequence
  synthetic peptide
FLALPGNPEAPGNMGL

SEQ ID NO: 6114 - protein, 16 aa, Artificial sequence
  synthetic peptide
LALPGNPEAPGNMGLF

SEQ ID NO: 6115 - protein, 16 aa, Artificial sequence
  synthetic peptide
ALPGNPEAPGNMGLFD

SEQ ID NO: 6116 - protein, 16 aa, Artificial sequence
  synthetic peptide
LPGNPEAPGNMGLFDQ

SEQ ID NO: 6117 - protein, 16 aa, Artificial sequence
  synthetic peptide
PGNPEAPGNMGLFDQQ

SEQ ID NO: 6118 - protein, 16 aa, Artificial sequence
  synthetic peptide
GNPEAPGNMGLFDQQL

SEQ ID NO: 6119 - protein, 16 aa, Artificial sequence
  synthetic peptide
NPEAPGNMGLFDQQLA

SEQ ID NO: 6120 - protein, 16 aa, Artificial sequence
  synthetic peptide
PEAPGNMGLFDQQLAL

SEQ ID NO: 6121 - protein, 16 aa, Artificial sequence
  synthetic peptide
EAPGNMGLFDQQLALQ

SEQ ID NO: 6122 - protein, 16 aa, Artificial sequence
  synthetic peptide
APGNMGLFDQQLALQW

SEQ ID NO: 6123 - protein, 16 aa, Artificial sequence
  synthetic peptide
PGNMGLFDQQLALQWV

SEQ ID NO: 6124 - protein, 16 aa, Artificial sequence
  synthetic peptide
GNMGLFDQQLALQWVQ

SEQ ID NO: 6125 - protein, 16 aa, Artificial sequence
  synthetic peptide
NMGLFDQQLALQWVQK

SEQ ID NO: 6126 - protein, 16 aa, Artificial sequence
  synthetic peptide
MGLFDQQLALQWVQKN

SEQ ID NO: 6127 - protein, 16 aa, Artificial sequence
  synthetic peptide
GLFDQQLALQWVQKNI

SEQ ID NO: 6128 - protein, 16 aa, Artificial sequence
  synthetic peptide
LFDQQLALQWVQKNIA

SEQ ID NO: 6129 - protein, 16 aa, Artificial sequence
  synthetic peptide
FDQQLALQWVQKNIAA

SEQ ID NO: 6130 - protein, 16 aa, Artificial sequence
  synthetic peptide
DQQLALQWVQKNIAAF

SEQ ID NO: 6131 - protein, 16 aa, Artificial sequence
  synthetic peptide
QQLALQWVQKNIAAFG

SEQ ID NO: 6132 - protein, 16 aa, Artificial sequence
  synthetic peptide
QLALQWVQKNIAAFGG

SEQ ID NO: 6133 - protein, 16 aa, Artificial sequence
  synthetic peptide
LALQWVQKNIAAFGGN

SEQ ID NO: 6134 - protein, 16 aa, Artificial sequence
  synthetic peptide
ALQWVQKNIAAFGGNP

SEQ ID NO: 6135 - protein, 16 aa, Artificial sequence
  synthetic peptide
LQWVQKNIAAFGGNPK

SEQ ID NO: 6136 - protein, 16 aa, Artificial sequence
  synthetic peptide
QWVQKNIAAFGGNPKS

SEQ ID NO: 6137 - protein, 16 aa, Artificial sequence
  synthetic peptide
WVQKNIAAFGGNPKSV

SEQ ID NO: 6138 - protein, 16 aa, Artificial sequence
  synthetic peptide
VQKNIAAFGGNPKSVT

SEQ ID NO: 6139 - protein, 16 aa, Artificial sequence
  synthetic peptide
QKNIAAFGGNPKSVTL

SEQ ID NO: 6140 - protein, 16 aa, Artificial sequence
  synthetic peptide
KNIAAFGGNPKSVTLF

SEQ ID NO: 6141 - protein, 16 aa, Artificial sequence
  synthetic peptide
NIAAFGGNPKSVTLFG

SEQ ID NO: 6142 - protein, 16 aa, Artificial sequence
  synthetic peptide
IAAFGGNPKSVTLFGE

SEQ ID NO: 6143 - protein, 16 aa, Artificial sequence
  synthetic peptide
AAFGGNPKSVTLFGES

SEQ ID NO: 6144 - protein, 16 aa, Artificial sequence
  synthetic peptide
AFGGNPKSVTLFGESA

SEQ ID NO: 6145 - protein, 16 aa, Artificial sequence
  synthetic peptide
FGGNPKSVTLFGESAG

SEQ ID NO: 6146 - protein, 16 aa, Artificial sequence
  synthetic peptide
GGNPKSVTLFGESAGA

SEQ ID NO: 6147 - protein, 16 aa, Artificial sequence
  synthetic peptide
GNPKSVTLFGESAGAA

SEQ ID NO: 6148 - protein, 16 aa, Artificial sequence
  synthetic peptide
NPKSVTLFGESAGAAS

SEQ ID NO: 6149 - protein, 16 aa, Artificial sequence
  synthetic peptide
PKSVTLFGESAGAASV

SEQ ID NO: 6150 - protein, 16 aa, Artificial sequence
  synthetic peptide
KSVTLFGESAGAASVS

SEQ ID NO: 6151 - protein, 16 aa, Artificial sequence
  synthetic peptide
SVTLFGESAGAASVSL

SEQ ID NO: 6152 - protein, 16 aa, Artificial sequence
  synthetic peptide
VTLFGESAGAASVSLH

SEQ ID NO: 6153 - protein, 16 aa, Artificial sequence
  synthetic peptide
TLFGESAGAASVSLHL

SEQ ID NO: 6154 - protein, 16 aa, Artificial sequence
  synthetic peptide
LFGESAGAASVSLHLL

SEQ ID NO: 6155 - protein, 16 aa, Artificial sequence
  synthetic peptide
FGESAGAASVSLHLLS

SEQ ID NO: 6156 - protein, 16 aa, Artificial sequence
  synthetic peptide
GESAGAASVSLHLLSP

SEQ ID NO: 6157 - protein, 16 aa, Artificial sequence
  synthetic peptide
ESAGAASVSLHLLSPG

SEQ ID NO: 6158 - protein, 16 aa, Artificial sequence
  synthetic peptide
SAGAASVSLHLLSPGS

SEQ ID NO: 6159 - protein, 16 aa, Artificial sequence
  synthetic peptide
AGAASVSLHLLSPGSH

SEQ ID NO: 6160 - protein, 16 aa, Artificial sequence
  synthetic peptide
GAASVSLHLLSPGSHS

SEQ ID NO: 6161 - protein, 16 aa, Artificial sequence
  synthetic peptide
AASVSLHLLSPGSHSL

SEQ ID NO: 6162 - protein, 16 aa, Artificial sequence
  synthetic peptide
ASVSLHLLSPGSHSLF

SEQ ID NO: 6163 - protein, 16 aa, Artificial sequence
  synthetic peptide
SVSLHLLSPGSHSLFT

SEQ ID NO: 6164 - protein, 16 aa, Artificial sequence
  synthetic peptide
VSLHLLSPGSHSLFTR

SEQ ID NO: 6165 - protein, 16 aa, Artificial sequence
  synthetic peptide
SLHLLSPGSHSLFTRA

SEQ ID NO: 6166 - protein, 16 aa, Artificial sequence
  synthetic peptide
LHLLSPGSHSLFTRAI

SEQ ID NO: 6167 - protein, 16 aa, Artificial sequence
  synthetic peptide
HLLSPGSHSLFTRAIL

SEQ ID NO: 6168 - protein, 16 aa, Artificial sequence
  synthetic peptide
LLSPGSHSLFTRAILQ

SEQ ID NO: 6169 - protein, 16 aa, Artificial sequence
  synthetic peptide
LSPGSHSLFTRAILQS

SEQ ID NO: 6170 - protein, 16 aa, Artificial sequence
  synthetic peptide
SPGSHSLFTRAILQSG

SEQ ID NO: 6171 - protein, 16 aa, Artificial sequence
  synthetic peptide
PGSHSLFTRAILQSGS

SEQ ID NO: 6172 - protein, 16 aa, Artificial sequence
  synthetic peptide
GSHSLFTRAILQSGSF

SEQ ID NO: 6173 - protein, 16 aa, Artificial sequence
  synthetic peptide
SHSLFTRAILQSGSFN

SEQ ID NO: 6174 - protein, 16 aa, Artificial sequence
  synthetic peptide
HSLFTRAILQSGSFNA

SEQ ID NO: 6175 - protein, 16 aa, Artificial sequence
  synthetic peptide
SLFTRAILQSGSFNAP

SEQ ID NO: 6176 - protein, 16 aa, Artificial sequence
  synthetic peptide
LFTRAILQSGSFNAPW

SEQ ID NO: 6177 - protein, 16 aa, Artificial sequence
  synthetic peptide
FTRAILQSGSFNAPWA

SEQ ID NO: 6178 - protein, 16 aa, Artificial sequence
  synthetic peptide
TRAILQSGSFNAPWAV

SEQ ID NO: 6179 - protein, 16 aa, Artificial sequence
  synthetic peptide
RAILQSGSFNAPWAVT

SEQ ID NO: 6180 - protein, 16 aa, Artificial sequence
  synthetic peptide
AILQSGSFNAPWAVTS

SEQ ID NO: 6181 - protein, 16 aa, Artificial sequence
  synthetic peptide
ILQSGSFNAPWAVTSL

SEQ ID NO: 6182 - protein, 16 aa, Artificial sequence
  synthetic peptide
LQSGSFNAPWAVTSLY

SEQ ID NO: 6183 - protein, 16 aa, Artificial sequence
  synthetic peptide
QSGSFNAPWAVTSLYE

SEQ ID NO: 6184 - protein, 16 aa, Artificial sequence
  synthetic peptide
SGSFNAPWAVTSLYEA

SEQ ID NO: 6185 - protein, 16 aa, Artificial sequence
  synthetic peptide
GSFNAPWAVTSLYEAR

SEQ ID NO: 6186 - protein, 16 aa, Artificial sequence
  synthetic peptide
SFNAPWAVTSLYEARN

SEQ ID NO: 6187 - protein, 16 aa, Artificial sequence
  synthetic peptide
FNAPWAVTSLYEARNR

SEQ ID NO: 6188 - protein, 16 aa, Artificial sequence
  synthetic peptide
NAPWAVTSLYEARNRT

SEQ ID NO: 6189 - protein, 16 aa, Artificial sequence
  synthetic peptide
APWAVTSLYEARNRTL

SEQ ID NO: 6190 - protein, 16 aa, Artificial sequence
  synthetic peptide
PWAVTSLYEARNRTLN

SEQ ID NO: 6191 - protein, 16 aa, Artificial sequence
  synthetic peptide
WAVTSLYEARNRTLNL

SEQ ID NO: 6192 - protein, 16 aa, Artificial sequence
  synthetic peptide
AVTSLYEARNRTLNLA

SEQ ID NO: 6193 - protein, 16 aa, Artificial sequence
  synthetic peptide
VTSLYEARNRTLNLAK

SEQ ID NO: 6194 - protein, 16 aa, Artificial sequence
  synthetic peptide
TSLYEARNRTLNLAKL

SEQ ID NO: 6195 - protein, 16 aa, Artificial sequence
  synthetic peptide
SLYEARNRTLNLAKLT

SEQ ID NO: 6196 - protein, 16 aa, Artificial sequence
  synthetic peptide
LYEARNRTLNLAKLTG

SEQ ID NO: 6197 - protein, 16 aa, Artificial sequence
  synthetic peptide
YEARNRTLNLAKLTGC

SEQ ID NO: 6198 - protein, 16 aa, Artificial sequence
  synthetic peptide
EARNRTLNLAKLTGCS

SEQ ID NO: 6199 - protein, 16 aa, Artificial sequence
  synthetic peptide
ARNRTLNLAKLTGCSR

SEQ ID NO: 6200 - protein, 16 aa, Artificial sequence
  synthetic peptide
RNRTLNLAKLTGCSRE

SEQ ID NO: 6201 - protein, 16 aa, Artificial sequence
  synthetic peptide
NRTLNLAKLTGCSREN

SEQ ID NO: 6202 - protein, 16 aa, Artificial sequence
  synthetic peptide
RTLNLAKLTGCSRENE

SEQ ID NO: 6203 - protein, 16 aa, Artificial sequence
  synthetic peptide
TLNLAKLTGCSRENET

SEQ ID NO: 6204 - protein, 16 aa, Artificial sequence
  synthetic peptide
LNLAKLTGCSRENETE

SEQ ID NO: 6205 - protein, 16 aa, Artificial sequence
  synthetic peptide
NLAKLTGCSRENETEI

SEQ ID NO: 6206 - protein, 16 aa, Artificial sequence
  synthetic peptide
LAKLTGCSRENETEII

SEQ ID NO: 6207 - protein, 16 aa, Artificial sequence
  synthetic peptide
AKLTGCSRENETEIIK

SEQ ID NO: 6208 - protein, 16 aa, Artificial sequence
  synthetic peptide
KLTGCSRENETEIIKC

SEQ ID NO: 6209 - protein, 16 aa, Artificial sequence
  synthetic peptide
LTGCSRENETEIIKCL

SEQ ID NO: 6210 - protein, 16 aa, Artificial sequence
  synthetic peptide
TGCSRENETEIIKCLR

SEQ ID NO: 6211 - protein, 16 aa, Artificial sequence
  synthetic peptide
GCSRENETEIIKCLRN

SEQ ID NO: 6212 - protein, 16 aa, Artificial sequence
  synthetic peptide
CSRENETEIIKCLRNK

SEQ ID NO: 6213 - protein, 16 aa, Artificial sequence
  synthetic peptide
SRENETEIIKCLRNKD

SEQ ID NO: 6214 - protein, 16 aa, Artificial sequence
  synthetic peptide
RENETEIIKCLRNKDP

SEQ ID NO: 6215 - protein, 16 aa, Artificial sequence
  synthetic peptide
ENETEIIKCLRNKDPQ

SEQ ID NO: 6216 - protein, 16 aa, Artificial sequence
  synthetic peptide
NETEIIKCLRNKDPQE

SEQ ID NO: 6217 - protein, 16 aa, Artificial sequence
  synthetic peptide
ETEIIKCLRNKDPQEI

SEQ ID NO: 6218 - protein, 16 aa, Artificial sequence
  synthetic peptide
TEIIKCLRNKDPQEIL

SEQ ID NO: 6219 - protein, 16 aa, Artificial sequence
  synthetic peptide
EIIKCLRNKDPQEILL

SEQ ID NO: 6220 - protein, 16 aa, Artificial sequence
  synthetic peptide
IIKCLRNKDPQEILLN

SEQ ID NO: 6221 - protein, 16 aa, Artificial sequence
  synthetic peptide
IKCLRNKDPQEILLNE

SEQ ID NO: 6222 - protein, 16 aa, Artificial sequence
  synthetic peptide
KCLRNKDPQEILLNEA

SEQ ID NO: 6223 - protein, 16 aa, Artificial sequence
  synthetic peptide
CLRNKDPQEILLNEAF

SEQ ID NO: 6224 - protein, 16 aa, Artificial sequence
  synthetic peptide
LRNKDPQEILLNEAFV

SEQ ID NO: 6225 - protein, 16 aa, Artificial sequence
  synthetic peptide
RNKDPQEILLNEAFVV

SEQ ID NO: 6226 - protein, 16 aa, Artificial sequence
  synthetic peptide
NKDPQEILLNEAFVVP

SEQ ID NO: 6227 - protein, 16 aa, Artificial sequence
  synthetic peptide
KDPQEILLNEAFVVPY

SEQ ID NO: 6228 - protein, 16 aa, Artificial sequence
  synthetic peptide
DPQEILLNEAFVVPYG

SEQ ID NO: 6229 - protein, 16 aa, Artificial sequence
  synthetic peptide
PQEILLNEAFVVPYGT

SEQ ID NO: 6230 - protein, 16 aa, Artificial sequence
  synthetic peptide
QEILLNEAFVVPYGTP

SEQ ID NO: 6231 - protein, 16 aa, Artificial sequence
  synthetic peptide
EILLNEAFVVPYGTPL

SEQ ID NO: 6232 - protein, 16 aa, Artificial sequence
  synthetic peptide
ILLNEAFVVPYGTPLS

SEQ ID NO: 6233 - protein, 16 aa, Artificial sequence
  synthetic peptide
LLNEAFVVPYGTPLSV

SEQ ID NO: 6234 - protein, 16 aa, Artificial sequence
  synthetic peptide
LNEAFVVPYGTPLSVN

SEQ ID NO: 6235 - protein, 16 aa, Artificial sequence
  synthetic peptide
NEAFVVPYGTPLSVNF

SEQ ID NO: 6236 - protein, 16 aa, Artificial sequence
  synthetic peptide
EAFVVPYGTPLSVNFG

SEQ ID NO: 6237 - protein, 16 aa, Artificial sequence
  synthetic peptide
AFVVPYGTPLSVNFGP

SEQ ID NO: 6238 - protein, 16 aa, Artificial sequence
  synthetic peptide
FVVPYGTPLSVNFGPT

SEQ ID NO: 6239 - protein, 16 aa, Artificial sequence
  synthetic peptide
VVPYGTPLSVNFGPTV

SEQ ID NO: 6240 - protein, 16 aa, Artificial sequence
  synthetic peptide
VPYGTPLSVNFGPTVD

SEQ ID NO: 6241 - protein, 16 aa, Artificial sequence
  synthetic peptide
PYGTPLSVNFGPTVDG

SEQ ID NO: 6242 - protein, 16 aa, Artificial sequence
  synthetic peptide
YGTPLSVNFGPTVDGD

SEQ ID NO: 6243 - protein, 16 aa, Artificial sequence
  synthetic peptide
GTPLSVNFGPTVDGDF

SEQ ID NO: 6244 - protein, 16 aa, Artificial sequence
  synthetic peptide
TPLSVNFGPTVDGDFL

SEQ ID NO: 6245 - protein, 16 aa, Artificial sequence
  synthetic peptide
PLSVNFGPTVDGDFLT

SEQ ID NO: 6246 - protein, 16 aa, Artificial sequence
  synthetic peptide
LSVNFGPTVDGDFLTD

SEQ ID NO: 6247 - protein, 16 aa, Artificial sequence
  synthetic peptide
SVNFGPTVDGDFLTDM

SEQ ID NO: 6248 - protein, 16 aa, Artificial sequence
  synthetic peptide
VNFGPTVDGDFLTDMP

SEQ ID NO: 6249 - protein, 16 aa, Artificial sequence
  synthetic peptide
NFGPTVDGDFLTDMPD

SEQ ID NO: 6250 - protein, 16 aa, Artificial sequence
  synthetic peptide
FGPTVDGDFLTDMPDI

SEQ ID NO: 6251 - protein, 16 aa, Artificial sequence
  synthetic peptide
GPTVDGDFLTDMPDIL

SEQ ID NO: 6252 - protein, 16 aa, Artificial sequence
  synthetic peptide
PTVDGDFLTDMPDILL

SEQ ID NO: 6253 - protein, 16 aa, Artificial sequence
  synthetic peptide
TVDGDFLTDMPDILLE

SEQ ID NO: 6254 - protein, 16 aa, Artificial sequence
  synthetic peptide
VDGDFLTDMPDILLEL

SEQ ID NO: 6255 - protein, 16 aa, Artificial sequence
  synthetic peptide
DGDFLTDMPDILLELG

SEQ ID NO: 6256 - protein, 16 aa, Artificial sequence
  synthetic peptide
GDFLTDMPDILLELGQ

SEQ ID NO: 6257 - protein, 16 aa, Artificial sequence
  synthetic peptide
DFLTDMPDILLELGQF

SEQ ID NO: 6258 - protein, 16 aa, Artificial sequence
  synthetic peptide
FLTDMPDILLELGQFK

SEQ ID NO: 6259 - protein, 16 aa, Artificial sequence
  synthetic peptide
LTDMPDILLELGQFKK

SEQ ID NO: 6260 - protein, 16 aa, Artificial sequence
  synthetic peptide
TDMPDILLELGQFKKT

SEQ ID NO: 6261 - protein, 16 aa, Artificial sequence
  synthetic peptide
DMPDILLELGQFKKTQ

SEQ ID NO: 6262 - protein, 16 aa, Artificial sequence
  synthetic peptide
MPDILLELGQFKKTQI

SEQ ID NO: 6263 - protein, 16 aa, Artificial sequence
  synthetic peptide
PDILLELGQFKKTQIL

SEQ ID NO: 6264 - protein, 16 aa, Artificial sequence
  synthetic peptide
DILLELGQFKKTQILV

SEQ ID NO: 6265 - protein, 16 aa, Artificial sequence
  synthetic peptide
ILLELGQFKKTQILVG

SEQ ID NO: 6266 - protein, 16 aa, Artificial sequence
  synthetic peptide
LLELGQFKKTQILVGV

SEQ ID NO: 6267 - protein, 16 aa, Artificial sequence
  synthetic peptide
LELGQFKKTQILVGVN

SEQ ID NO: 6268 - protein, 16 aa, Artificial sequence
  synthetic peptide
ELGQFKKTQILVGVNK

SEQ ID NO: 6269 - protein, 16 aa, Artificial sequence
  synthetic peptide
LGQFKKTQILVGVNKD

SEQ ID NO: 6270 - protein, 16 aa, Artificial sequence
  synthetic peptide
GQFKKTQILVGVNKDE

SEQ ID NO: 6271 - protein, 16 aa, Artificial sequence
  synthetic peptide
QFKKTQILVGVNKDEG

SEQ ID NO: 6272 - protein, 16 aa, Artificial sequence
  synthetic peptide
FKKTQILVGVNKDEGT

SEQ ID NO: 6273 - protein, 16 aa, Artificial sequence
  synthetic peptide
KKTQILVGVNKDEGTA

SEQ ID NO: 6274 - protein, 16 aa, Artificial sequence
  synthetic peptide
KTQILVGVNKDEGTAF

SEQ ID NO: 6275 - protein, 16 aa, Artificial sequence
  synthetic peptide
TQILVGVNKDEGTAFL

SEQ ID NO: 6276 - protein, 16 aa, Artificial sequence
  synthetic peptide
QILVGVNKDEGTAFLV

SEQ ID NO: 6277 - protein, 16 aa, Artificial sequence
  synthetic peptide
ILVGVNKDEGTAFLVY

SEQ ID NO: 6278 - protein, 16 aa, Artificial sequence
  synthetic peptide
LVGVNKDEGTAFLVYG

SEQ ID NO: 6279 - protein, 16 aa, Artificial sequence
  synthetic peptide
VGVNKDEGTAFLVYGA

SEQ ID NO: 6280 - protein, 16 aa, Artificial sequence
  synthetic peptide
GVNKDEGTAFLVYGAP

SEQ ID NO: 6281 - protein, 16 aa, Artificial sequence
  synthetic peptide
VNKDEGTAFLVYGAPG

SEQ ID NO: 6282 - protein, 16 aa, Artificial sequence
  synthetic peptide
NKDEGTAFLVYGAPGF

SEQ ID NO: 6283 - protein, 16 aa, Artificial sequence
  synthetic peptide
KDEGTAFLVYGAPGFS

SEQ ID NO: 6284 - protein, 16 aa, Artificial sequence
  synthetic peptide
DEGTAFLVYGAPGFSK

SEQ ID NO: 6285 - protein, 16 aa, Artificial sequence
  synthetic peptide
EGTAFLVYGAPGFSKD

SEQ ID NO: 6286 - protein, 16 aa, Artificial sequence
  synthetic peptide
GTAFLVYGAPGFSKDN

SEQ ID NO: 6287 - protein, 16 aa, Artificial sequence
  synthetic peptide
TAFLVYGAPGFSKDNN

SEQ ID NO: 6288 - protein, 16 aa, Artificial sequence
  synthetic peptide
AFLVYGAPGFSKDNNS

SEQ ID NO: 6289 - protein, 16 aa, Artificial sequence
  synthetic peptide
FLVYGAPGFSKDNNSI

SEQ ID NO: 6290 - protein, 16 aa, Artificial sequence
  synthetic peptide
LVYGAPGFSKDNNSII

SEQ ID NO: 6291 - protein, 16 aa, Artificial sequence
  synthetic peptide
VYGAPGFSKDNNSIIT

SEQ ID NO: 6292 - protein, 16 aa, Artificial sequence
  synthetic peptide
YGAPGFSKDNNSIITR

SEQ ID NO: 6293 - protein, 16 aa, Artificial sequence
  synthetic peptide
GAPGFSKDNNSIITRK

SEQ ID NO: 6294 - protein, 16 aa, Artificial sequence
  synthetic peptide
APGFSKDNNSIITRKE

SEQ ID NO: 6295 - protein, 16 aa, Artificial sequence
  synthetic peptide
PGFSKDNNSIITRKEF

SEQ ID NO: 6296 - protein, 16 aa, Artificial sequence
  synthetic peptide
GFSKDNNSIITRKEFQ

SEQ ID NO: 6297 - protein, 16 aa, Artificial sequence
  synthetic peptide
FSKDNNSIITRKEFQE

SEQ ID NO: 6298 - protein, 16 aa, Artificial sequence
  synthetic peptide
SKDNNSIITRKEFQEG

SEQ ID NO: 6299 - protein, 16 aa, Artificial sequence
  synthetic peptide
KDNNSIITRKEFQEGL

SEQ ID NO: 6300 - protein, 16 aa, Artificial sequence
  synthetic peptide
DNNSIITRKEFQEGLK

SEQ ID NO: 6301 - protein, 16 aa, Artificial sequence
  synthetic peptide
NNSIITRKEFQEGLKI

SEQ ID NO: 6302 - protein, 16 aa, Artificial sequence
  synthetic peptide
NSIITRKEFQEGLKIF

SEQ ID NO: 6303 - protein, 16 aa, Artificial sequence
  synthetic peptide
SIITRKEFQEGLKIFF

SEQ ID NO: 6304 - protein, 16 aa, Artificial sequence
  synthetic peptide
IITRKEFQEGLKIFFP

SEQ ID NO: 6305 - protein, 16 aa, Artificial sequence
  synthetic peptide
ITRKEFQEGLKIFFPG

SEQ ID NO: 6306 - protein, 16 aa, Artificial sequence
  synthetic peptide
TRKEFQEGLKIFFPGV

SEQ ID NO: 6307 - protein, 16 aa, Artificial sequence
  synthetic peptide
RKEFQEGLKIFFPGVS

SEQ ID NO: 6308 - protein, 16 aa, Artificial sequence
  synthetic peptide
KEFQEGLKIFFPGVSE

SEQ ID NO: 6309 - protein, 16 aa, Artificial sequence
  synthetic peptide
EFQEGLKIFFPGVSEF

SEQ ID NO: 6310 - protein, 16 aa, Artificial sequence
  synthetic peptide
FQEGLKIFFPGVSEFG

SEQ ID NO: 6311 - protein, 16 aa, Artificial sequence
  synthetic peptide
QEGLKIFFPGVSEFGK

SEQ ID NO: 6312 - protein, 16 aa, Artificial sequence
  synthetic peptide
EGLKIFFPGVSEFGKE

SEQ ID NO: 6313 - protein, 16 aa, Artificial sequence
  synthetic peptide
GLKIFFPGVSEFGKES

SEQ ID NO: 6314 - protein, 16 aa, Artificial sequence
  synthetic peptide
LKIFFPGVSEFGKESI

SEQ ID NO: 6315 - protein, 16 aa, Artificial sequence
  synthetic peptide
KIFFPGVSEFGKESIL

SEQ ID NO: 6316 - protein, 16 aa, Artificial sequence
  synthetic peptide
IFFPGVSEFGKESILF

SEQ ID NO: 6317 - protein, 16 aa, Artificial sequence
  synthetic peptide
FFPGVSEFGKESILFH

SEQ ID NO: 6318 - protein, 16 aa, Artificial sequence
  synthetic peptide
FPGVSEFGKESILFHY

SEQ ID NO: 6319 - protein, 16 aa, Artificial sequence
  synthetic peptide
PGVSEFGKESILFHYT

SEQ ID NO: 6320 - protein, 16 aa, Artificial sequence
  synthetic peptide
GVSEFGKESILFHYTD

SEQ ID NO: 6321 - protein, 16 aa, Artificial sequence
  synthetic peptide
VSEFGKESILFHYTDW

SEQ ID NO: 6322 - protein, 16 aa, Artificial sequence
  synthetic peptide
SEFGKESILFHYTDWV

SEQ ID NO: 6323 - protein, 16 aa, Artificial sequence
  synthetic peptide
EFGKESILFHYTDWVD

SEQ ID NO: 6324 - protein, 16 aa, Artificial sequence
  synthetic peptide
FGKESILFHYTDWVDD

SEQ ID NO: 6325 - protein, 16 aa, Artificial sequence
  synthetic peptide
GKESILFHYTDWVDDQ

SEQ ID NO: 6326 - protein, 16 aa, Artificial sequence
  synthetic peptide
KESILFHYTDWVDDQR

SEQ ID NO: 6327 - protein, 16 aa, Artificial sequence
  synthetic peptide
ESILFHYTDWVDDQRP

SEQ ID NO: 6328 - protein, 16 aa, Artificial sequence
  synthetic peptide
SILFHYTDWVDDQRPE

SEQ ID NO: 6329 - protein, 16 aa, Artificial sequence
  synthetic peptide
ILFHYTDWVDDQRPEN

SEQ ID NO: 6330 - protein, 16 aa, Artificial sequence
  synthetic peptide
LFHYTDWVDDQRPENY

SEQ ID NO: 6331 - protein, 16 aa, Artificial sequence
  synthetic peptide
FHYTDWVDDQRPENYR

SEQ ID NO: 6332 - protein, 16 aa, Artificial sequence
  synthetic peptide
HYTDWVDDQRPENYRE

SEQ ID NO: 6333 - protein, 16 aa, Artificial sequence
  synthetic peptide
YTDWVDDQRPENYREA

SEQ ID NO: 6334 - protein, 16 aa, Artificial sequence
  synthetic peptide
TDWVDDQRPENYREAL

SEQ ID NO: 6335 - protein, 16 aa, Artificial sequence
  synthetic peptide
DWVDDQRPENYREALG

SEQ ID NO: 6336 - protein, 16 aa, Artificial sequence
  synthetic peptide
WVDDQRPENYREALGD

SEQ ID NO: 6337 - protein, 16 aa, Artificial sequence
  synthetic peptide
VDDQRPENYREALGDV

SEQ ID NO: 6338 - protein, 16 aa, Artificial sequence
  synthetic peptide
DDQRPENYREALGDVV

SEQ ID NO: 6339 - protein, 16 aa, Artificial sequence
  synthetic peptide
DQRPENYREALGDVVG

SEQ ID NO: 6340 - protein, 16 aa, Artificial sequence
  synthetic peptide
QRPENYREALGDVVGD

SEQ ID NO: 6341 - protein, 16 aa, Artificial sequence
  synthetic peptide
RPENYREALGDVVGDY

SEQ ID NO: 6342 - protein, 16 aa, Artificial sequence
  synthetic peptide
PENYREALGDVVGDYN

SEQ ID NO: 6343 - protein, 16 aa, Artificial sequence
  synthetic peptide
ENYREALGDVVGDYNF

SEQ ID NO: 6344 - protein, 16 aa, Artificial sequence
  synthetic peptide
NYREALGDVVGDYNFI

SEQ ID NO: 6345 - protein, 16 aa, Artificial sequence
  synthetic peptide
YREALGDVVGDYNFIC

SEQ ID NO: 6346 - protein, 16 aa, Artificial sequence
  synthetic peptide
REALGDVVGDYNFICP

SEQ ID NO: 6347 - protein, 16 aa, Artificial sequence
  synthetic peptide
EALGDVVGDYNFICPA

SEQ ID NO: 6348 - protein, 16 aa, Artificial sequence
  synthetic peptide
ALGDVVGDYNFICPAL

SEQ ID NO: 6349 - protein, 16 aa, Artificial sequence
  synthetic peptide
LGDVVGDYNFICPALE

SEQ ID NO: 6350 - protein, 16 aa, Artificial sequence
  synthetic peptide
GDVVGDYNFICPALEF

SEQ ID NO: 6351 - protein, 16 aa, Artificial sequence
  synthetic peptide
DVVGDYNFICPALEFT

SEQ ID NO: 6352 - protein, 16 aa, Artificial sequence
  synthetic peptide
VVGDYNFICPALEFTK

SEQ ID NO: 6353 - protein, 16 aa, Artificial sequence
  synthetic peptide
VGDYNFICPALEFTKK

SEQ ID NO: 6354 - protein, 16 aa, Artificial sequence
  synthetic peptide
GDYNFICPALEFTKKF

SEQ ID NO: 6355 - protein, 16 aa, Artificial sequence
  synthetic peptide
DYNFICPALEFTKKFS

SEQ ID NO: 6356 - protein, 16 aa, Artificial sequence
  synthetic peptide
YNFICPALEFTKKFSE

SEQ ID NO: 6357 - protein, 16 aa, Artificial sequence
  synthetic peptide
NFICPALEFTKKFSEW

SEQ ID NO: 6358 - protein, 16 aa, Artificial sequence
  synthetic peptide
FICPALEFTKKFSEWG

SEQ ID NO: 6359 - protein, 16 aa, Artificial sequence
  synthetic peptide
ICPALEFTKKFSEWGN

SEQ ID NO: 6360 - protein, 16 aa, Artificial sequence
  synthetic peptide
CPALEFTKKFSEWGNN

SEQ ID NO: 6361 - protein, 16 aa, Artificial sequence
  synthetic peptide
PALEFTKKFSEWGNNA

SEQ ID NO: 6362 - protein, 16 aa, Artificial sequence
  synthetic peptide
ALEFTKKFSEWGNNAF

SEQ ID NO: 6363 - protein, 16 aa, Artificial sequence
  synthetic peptide
LEFTKKFSEWGNNAFF

SEQ ID NO: 6364 - protein, 16 aa, Artificial sequence
  synthetic peptide
EFTKKFSEWGNNAFFY

SEQ ID NO: 6365 - protein, 16 aa, Artificial sequence
  synthetic peptide
FTKKFSEWGNNAFFYY

SEQ ID NO: 6366 - protein, 16 aa, Artificial sequence
  synthetic peptide
TKKFSEWGNNAFFYYF

SEQ ID NO: 6367 - protein, 16 aa, Artificial sequence
  synthetic peptide
KKFSEWGNNAFFYYFE

SEQ ID NO: 6368 - protein, 16 aa, Artificial sequence
  synthetic peptide
KFSEWGNNAFFYYFEH

SEQ ID NO: 6369 - protein, 16 aa, Artificial sequence
  synthetic peptide
FSEWGNNAFFYYFEHR

SEQ ID NO: 6370 - protein, 16 aa, Artificial sequence
  synthetic peptide
SEWGNNAFFYYFEHRS

SEQ ID NO: 6371 - protein, 16 aa, Artificial sequence
  synthetic peptide
EWGNNAFFYYFEHRSS

SEQ ID NO: 6372 - protein, 16 aa, Artificial sequence
  synthetic peptide
WGNNAFFYYFEHRSSK

SEQ ID NO: 6373 - protein, 16 aa, Artificial sequence
  synthetic peptide
GNNAFFYYFEHRSSKL

SEQ ID NO: 6374 - protein, 16 aa, Artificial sequence
  synthetic peptide
NNAFFYYFEHRSSKLP

SEQ ID NO: 6375 - protein, 16 aa, Artificial sequence
  synthetic peptide
NAFFYYFEHRSSKLPW

SEQ ID NO: 6376 - protein, 16 aa, Artificial sequence
  synthetic peptide
AFFYYFEHRSSKLPWP

SEQ ID NO: 6377 - protein, 16 aa, Artificial sequence
  synthetic peptide
FFYYFEHRSSKLPWPE

SEQ ID NO: 6378 - protein, 16 aa, Artificial sequence
  synthetic peptide
FYYFEHRSSKLPWPEW

SEQ ID NO: 6379 - protein, 16 aa, Artificial sequence
  synthetic peptide
YYFEHRSSKLPWPEWM

SEQ ID NO: 6380 - protein, 16 aa, Artificial sequence
  synthetic peptide
YFEHRSSKLPWPEWMG

SEQ ID NO: 6381 - protein, 16 aa, Artificial sequence
  synthetic peptide
FEHRSSKLPWPEWMGV

SEQ ID NO: 6382 - protein, 16 aa, Artificial sequence
  synthetic peptide
EHRSSKLPWPEWMGVM

SEQ ID NO: 6383 - protein, 16 aa, Artificial sequence
  synthetic peptide
HRSSKLPWPEWMGVMH

SEQ ID NO: 6384 - protein, 16 aa, Artificial sequence
  synthetic peptide
RSSKLPWPEWMGVMHG

SEQ ID NO: 6385 - protein, 16 aa, Artificial sequence
  synthetic peptide
SSKLPWPEWMGVMHGY

SEQ ID NO: 6386 - protein, 16 aa, Artificial sequence
  synthetic peptide
SKLPWPEWMGVMHGYE

SEQ ID NO: 6387 - protein, 16 aa, Artificial sequence
  synthetic peptide
KLPWPEWMGVMHGYEI

SEQ ID NO: 6388 - protein, 16 aa, Artificial sequence
  synthetic peptide
LPWPEWMGVMHGYEIE

SEQ ID NO: 6389 - protein, 16 aa, Artificial sequence
  synthetic peptide
PWPEWMGVMHGYEIEF

SEQ ID NO: 6390 - protein, 16 aa, Artificial sequence
  synthetic peptide
WPEWMGVMHGYEIEFV

SEQ ID NO: 6391 - protein, 16 aa, Artificial sequence
  synthetic peptide
PEWMGVMHGYEIEFVF

SEQ ID NO: 6392 - protein, 16 aa, Artificial sequence
  synthetic peptide
EWMGVMHGYEIEFVFG

SEQ ID NO: 6393 - protein, 16 aa, Artificial sequence
  synthetic peptide
WMGVMHGYEIEFVFGL

SEQ ID NO: 6394 - protein, 16 aa, Artificial sequence
  synthetic peptide
MGVMHGYEIEFVFGLP

SEQ ID NO: 6395 - protein, 16 aa, Artificial sequence
  synthetic peptide
GVMHGYEIEFVFGLPL

SEQ ID NO: 6396 - protein, 16 aa, Artificial sequence
  synthetic peptide
VMHGYEIEFVFGLPLE

SEQ ID NO: 6397 - protein, 16 aa, Artificial sequence
  synthetic peptide
MHGYEIEFVFGLPLER

SEQ ID NO: 6398 - protein, 16 aa, Artificial sequence
  synthetic peptide
HGYEIEFVFGLPLERR

SEQ ID NO: 6399 - protein, 16 aa, Artificial sequence
  synthetic peptide
GYEIEFVFGLPLERRD

SEQ ID NO: 6400 - protein, 16 aa, Artificial sequence
  synthetic peptide
YEIEFVFGLPLERRDN

SEQ ID NO: 6401 - protein, 16 aa, Artificial sequence
  synthetic peptide
EIEFVFGLPLERRDNY

SEQ ID NO: 6402 - protein, 16 aa, Artificial sequence
  synthetic peptide
IEFVFGLPLERRDNYT

SEQ ID NO: 6403 - protein, 16 aa, Artificial sequence
  synthetic peptide
EFVFGLPLERRDNYTK

SEQ ID NO: 6404 - protein, 16 aa, Artificial sequence
  synthetic peptide
FVFGLPLERRDNYTKA

SEQ ID NO: 6405 - protein, 16 aa, Artificial sequence
  synthetic peptide
VFGLPLERRDNYTKAE

SEQ ID NO: 6406 - protein, 16 aa, Artificial sequence
  synthetic peptide
FGLPLERRDNYTKAEE

SEQ ID NO: 6407 - protein, 16 aa, Artificial sequence
  synthetic peptide
GLPLERRDNYTKAEEI

SEQ ID NO: 6408 - protein, 16 aa, Artificial sequence
  synthetic peptide
LPLERRDNYTKAEEIL

SEQ ID NO: 6409 - protein, 16 aa, Artificial sequence
  synthetic peptide
PLERRDNYTKAEEILS

SEQ ID NO: 6410 - protein, 16 aa, Artificial sequence
  synthetic peptide
LERRDNYTKAEEILSR

SEQ ID NO: 6411 - protein, 16 aa, Artificial sequence
  synthetic peptide
ERRDNYTKAEEILSRS

SEQ ID NO: 6412 - protein, 16 aa, Artificial sequence
  synthetic peptide
RRDNYTKAEEILSRSI

SEQ ID NO: 6413 - protein, 16 aa, Artificial sequence
  synthetic peptide
RDNYTKAEEILSRSIV

SEQ ID NO: 6414 - protein, 16 aa, Artificial sequence
  synthetic peptide
DNYTKAEEILSRSIVK

SEQ ID NO: 6415 - protein, 16 aa, Artificial sequence
  synthetic peptide
NYTKAEEILSRSIVKR

SEQ ID NO: 6416 - protein, 16 aa, Artificial sequence
  synthetic peptide
YTKAEEILSRSIVKRW

SEQ ID NO: 6417 - protein, 16 aa, Artificial sequence
  synthetic peptide
TKAEEILSRSIVKRWA

SEQ ID NO: 6418 - protein, 16 aa, Artificial sequence
  synthetic peptide
KAEEILSRSIVKRWAN

SEQ ID NO: 6419 - protein, 16 aa, Artificial sequence
  synthetic peptide
AEEILSRSIVKRWANF

SEQ ID NO: 6420 - protein, 16 aa, Artificial sequence
  synthetic peptide
EEILSRSIVKRWANFA

SEQ ID NO: 6421 - protein, 16 aa, Artificial sequence
  synthetic peptide
EILSRSIVKRWANFAK

SEQ ID NO: 6422 - protein, 16 aa, Artificial sequence
  synthetic peptide
ILSRSIVKRWANFAKY

SEQ ID NO: 6423 - protein, 16 aa, Artificial sequence
  synthetic peptide
LSRSIVKRWANFAKYG

SEQ ID NO: 6424 - protein, 16 aa, Artificial sequence
  synthetic peptide
SRSIVKRWANFAKYGN

SEQ ID NO: 6425 - protein, 16 aa, Artificial sequence
  synthetic peptide
RSIVKRWANFAKYGNP

SEQ ID NO: 6426 - protein, 16 aa, Artificial sequence
  synthetic peptide
SIVKRWANFAKYGNPN

SEQ ID NO: 6427 - protein, 16 aa, Artificial sequence
  synthetic peptide
IVKRWANFAKYGNPNE

SEQ ID NO: 6428 - protein, 16 aa, Artificial sequence
  synthetic peptide
VKRWANFAKYGNPNET

SEQ ID NO: 6429 - protein, 16 aa, Artificial sequence
  synthetic peptide
KRWANFAKYGNPNETQ

SEQ ID NO: 6430 - protein, 16 aa, Artificial sequence
  synthetic peptide
RWANFAKYGNPNETQN

SEQ ID NO: 6431 - protein, 16 aa, Artificial sequence
  synthetic peptide
WANFAKYGNPNETQNN

SEQ ID NO: 6432 - protein, 16 aa, Artificial sequence
  synthetic peptide
ANFAKYGNPNETQNNS

SEQ ID NO: 6433 - protein, 16 aa, Artificial sequence
  synthetic peptide
NFAKYGNPNETQNNST

SEQ ID NO: 6434 - protein, 16 aa, Artificial sequence
  synthetic peptide
FAKYGNPNETQNNSTS

SEQ ID NO: 6435 - protein, 16 aa, Artificial sequence
  synthetic peptide
AKYGNPNETQNNSTSW

SEQ ID NO: 6436 - protein, 16 aa, Artificial sequence
  synthetic peptide
KYGNPNETQNNSTSWP

SEQ ID NO: 6437 - protein, 16 aa, Artificial sequence
  synthetic peptide
YGNPNETQNNSTSWPV

SEQ ID NO: 6438 - protein, 16 aa, Artificial sequence
  synthetic peptide
GNPNETQNNSTSWPVF

SEQ ID NO: 6439 - protein, 16 aa, Artificial sequence
  synthetic peptide
NPNETQNNSTSWPVFK

SEQ ID NO: 6440 - protein, 16 aa, Artificial sequence
  synthetic peptide
PNETQNNSTSWPVFKS

SEQ ID NO: 6441 - protein, 16 aa, Artificial sequence
  synthetic peptide
NETQNNSTSWPVFKST

SEQ ID NO: 6442 - protein, 16 aa, Artificial sequence
  synthetic peptide
ETQNNSTSWPVFKSTE

SEQ ID NO: 6443 - protein, 16 aa, Artificial sequence
  synthetic peptide
TQNNSTSWPVFKSTEQ

SEQ ID NO: 6444 - protein, 16 aa, Artificial sequence
  synthetic peptide
QNNSTSWPVFKSTEQK

SEQ ID NO: 6445 - protein, 16 aa, Artificial sequence
  synthetic peptide
NNSTSWPVFKSTEQKY

SEQ ID NO: 6446 - protein, 16 aa, Artificial sequence
  synthetic peptide
NSTSWPVFKSTEQKYL

SEQ ID NO: 6447 - protein, 16 aa, Artificial sequence
  synthetic peptide
STSWPVFKSTEQKYLT

SEQ ID NO: 6448 - protein, 16 aa, Artificial sequence
  synthetic peptide
TSWPVFKSTEQKYLTL

SEQ ID NO: 6449 - protein, 16 aa, Artificial sequence
  synthetic peptide
SWPVFKSTEQKYLTLN

SEQ ID NO: 6450 - protein, 16 aa, Artificial sequence
  synthetic peptide
WPVFKSTEQKYLTLNT

SEQ ID NO: 6451 - protein, 16 aa, Artificial sequence
  synthetic peptide
PVFKSTEQKYLTLNTE

SEQ ID NO: 6452 - protein, 16 aa, Artificial sequence
  synthetic peptide
VFKSTEQKYLTLNTES

SEQ ID NO: 6453 - protein, 16 aa, Artificial sequence
  synthetic peptide
FKSTEQKYLTLNTEST

SEQ ID NO: 6454 - protein, 16 aa, Artificial sequence
  synthetic peptide
KSTEQKYLTLNTESTR

SEQ ID NO: 6455 - protein, 16 aa, Artificial sequence
  synthetic peptide
STEQKYLTLNTESTRI

SEQ ID NO: 6456 - protein, 16 aa, Artificial sequence
  synthetic peptide
TEQKYLTLNTESTRIM

SEQ ID NO: 6457 - protein, 16 aa, Artificial sequence
  synthetic peptide
EQKYLTLNTESTRIMT

SEQ ID NO: 6458 - protein, 16 aa, Artificial sequence
  synthetic peptide
QKYLTLNTESTRIMTK

SEQ ID NO: 6459 - protein, 16 aa, Artificial sequence
  synthetic peptide
KYLTLNTESTRIMTKL

SEQ ID NO: 6460 - protein, 16 aa, Artificial sequence
  synthetic peptide
YLTLNTESTRIMTKLR

SEQ ID NO: 6461 - protein, 16 aa, Artificial sequence
  synthetic peptide
LTLNTESTRIMTKLRA

SEQ ID NO: 6462 - protein, 16 aa, Artificial sequence
  synthetic peptide
TLNTESTRIMTKLRAQ

SEQ ID NO: 6463 - protein, 16 aa, Artificial sequence
  synthetic peptide
LNTESTRIMTKLRAQQ

SEQ ID NO: 6464 - protein, 16 aa, Artificial sequence
  synthetic peptide
NTESTRIMTKLRAQQC

SEQ ID NO: 6465 - protein, 16 aa, Artificial sequence
  synthetic peptide
TESTRIMTKLRAQQCR

SEQ ID NO: 6466 - protein, 16 aa, Artificial sequence
  synthetic peptide
ESTRIMTKLRAQQCRF

SEQ ID NO: 6467 - protein, 16 aa, Artificial sequence
  synthetic peptide
STRIMTKLRAQQCRFW

SEQ ID NO: 6468 - protein, 16 aa, Artificial sequence
  synthetic peptide
TRIMTKLRAQQCRFWT

SEQ ID NO: 6469 - protein, 16 aa, Artificial sequence
  synthetic peptide
RIMTKLRAQQCRFWTS

SEQ ID NO: 6470 - protein, 16 aa, Artificial sequence
  synthetic peptide
IMTKLRAQQCRFWTSF

SEQ ID NO: 6471 - protein, 16 aa, Artificial sequence
  synthetic peptide
MTKLRAQQCRFWTSFF

SEQ ID NO: 6472 - protein, 16 aa, Artificial sequence
  synthetic peptide
TKLRAQQCRFWTSFFP

SEQ ID NO: 6473 - protein, 16 aa, Artificial sequence
  synthetic peptide
KLRAQQCRFWTSFFPK

SEQ ID NO: 6474 - protein, 16 aa, Artificial sequence
  synthetic peptide
LRAQQCRFWTSFFPKV

SEQ ID NO: 6475 - protein, 16 aa, Artificial sequence
  synthetic peptide
RAQQCRFWTSFFPKVL

SEQ ID NO: 6476 - protein, 16 aa, Artificial sequence
  synthetic peptide
AQQCRFWTSFFPKVLE

SEQ ID NO: 6477 - protein, 16 aa, Artificial sequence
  synthetic peptide
QQCRFWTSFFPKVLEM

SEQ ID NO: 6478 - protein, 16 aa, Artificial sequence
  synthetic peptide
QCRFWTSFFPKVLEMT

SEQ ID NO: 6479 - protein, 16 aa, Artificial sequence
  synthetic peptide
CRFWTSFFPKVLEMTG

SEQ ID NO: 6480 - protein, 16 aa, Artificial sequence
  synthetic peptide
RFWTSFFPKVLEMTGN

SEQ ID NO: 6481 - protein, 16 aa, Artificial sequence
  synthetic peptide
FWTSFFPKVLEMTGNI

SEQ ID NO: 6482 - protein, 16 aa, Artificial sequence
  synthetic peptide
WTSFFPKVLEMTGNID

SEQ ID NO: 6483 - protein, 16 aa, Artificial sequence
  synthetic peptide
TSFFPKVLEMTGNIDE

SEQ ID NO: 6484 - protein, 16 aa, Artificial sequence
  synthetic peptide
SFFPKVLEMTGNIDEA

SEQ ID NO: 6485 - protein, 16 aa, Artificial sequence
  synthetic peptide
FFPKVLEMTGNIDEAE

SEQ ID NO: 6486 - protein, 16 aa, Artificial sequence
  synthetic peptide
FPKVLEMTGNIDEAEW

SEQ ID NO: 6487 - protein, 16 aa, Artificial sequence
  synthetic peptide
PKVLEMTGNIDEAEWE

SEQ ID NO: 6488 - protein, 16 aa, Artificial sequence
  synthetic peptide
KVLEMTGNIDEAEWEW

SEQ ID NO: 6489 - protein, 16 aa, Artificial sequence
  synthetic peptide
VLEMTGNIDEAEWEWK

SEQ ID NO: 6490 - protein, 16 aa, Artificial sequence
  synthetic peptide
LEMTGNIDEAEWEWKA

SEQ ID NO: 6491 - protein, 16 aa, Artificial sequence
  synthetic peptide
EMTGNIDEAEWEWKAG

SEQ ID NO: 6492 - protein, 16 aa, Artificial sequence
  synthetic peptide
MTGNIDEAEWEWKAGF

SEQ ID NO: 6493 - protein, 16 aa, Artificial sequence
  synthetic peptide
TGNIDEAEWEWKAGFH

SEQ ID NO: 6494 - protein, 16 aa, Artificial sequence
  synthetic peptide
GNIDEAEWEWKAGFHR

SEQ ID NO: 6495 - protein, 16 aa, Artificial sequence
  synthetic peptide
NIDEAEWEWKAGFHRW

SEQ ID NO: 6496 - protein, 16 aa, Artificial sequence
  synthetic peptide
IDEAEWEWKAGFHRWN

SEQ ID NO: 6497 - protein, 16 aa, Artificial sequence
  synthetic peptide
DEAEWEWKAGFHRWNN

SEQ ID NO: 6498 - protein, 16 aa, Artificial sequence
  synthetic peptide
EAEWEWKAGFHRWNNY

SEQ ID NO: 6499 - protein, 16 aa, Artificial sequence
  synthetic peptide
AEWEWKAGFHRWNNYM

SEQ ID NO: 6500 - protein, 16 aa, Artificial sequence
  synthetic peptide
EWEWKAGFHRWNNYMM

SEQ ID NO: 6501 - protein, 16 aa, Artificial sequence
  synthetic peptide
WEWKAGFHRWNNYMMD

SEQ ID NO: 6502 - protein, 16 aa, Artificial sequence
  synthetic peptide
EWKAGFHRWNNYMMDW

SEQ ID NO: 6503 - protein, 16 aa, Artificial sequence
  synthetic peptide
WKAGFHRWNNYMMDWK

SEQ ID NO: 6504 - protein, 16 aa, Artificial sequence
  synthetic peptide
KAGFHRWNNYMMDWKN

SEQ ID NO: 6505 - protein, 16 aa, Artificial sequence
  synthetic peptide
AGFHRWNNYMMDWKNQ

SEQ ID NO: 6506 - protein, 16 aa, Artificial sequence
  synthetic peptide
GFHRWNNYMMDWKNQF

SEQ ID NO: 6507 - protein, 16 aa, Artificial sequence
  synthetic peptide
FHRWNNYMMDWKNQFN

SEQ ID NO: 6508 - protein, 16 aa, Artificial sequence
  synthetic peptide
HRWNNYMMDWKNQFND

SEQ ID NO: 6509 - protein, 16 aa, Artificial sequence
  synthetic peptide
RWNNYMMDWKNQFNDY

SEQ ID NO: 6510 - protein, 16 aa, Artificial sequence
  synthetic peptide
WNNYMMDWKNQFNDYT

SEQ ID NO: 6511 - protein, 16 aa, Artificial sequence
  synthetic peptide
NNYMMDWKNQFNDYTS

SEQ ID NO: 6512 - protein, 16 aa, Artificial sequence
  synthetic peptide
NYMMDWKNQFNDYTSK

SEQ ID NO: 6513 - protein, 16 aa, Artificial sequence
  synthetic peptide
YMMDWKNQFNDYTSKK

SEQ ID NO: 6514 - protein, 16 aa, Artificial sequence
  synthetic peptide
MMDWKNQFNDYTSKKE

SEQ ID NO: 6515 - protein, 16 aa, Artificial sequence
  synthetic peptide
MDWKNQFNDYTSKKES

SEQ ID NO: 6516 - protein, 16 aa, Artificial sequence
  synthetic peptide
DWKNQFNDYTSKKESC

SEQ ID NO: 6517 - protein, 16 aa, Artificial sequence
  synthetic peptide
WKNQFNDYTSKKESCV

SEQ ID NO: 6518 - protein, 16 aa, Artificial sequence
  synthetic peptide
KNQFNDYTSKKESCVG

SEQ ID NO: 6519 - protein, 16 aa, Artificial sequence
  synthetic peptide
NQFNDYTSKKESCVGL

SEQ ID NO: 6520 - protein, 17 aa, Artificial sequence
  synthetic peptide
MHSKVTIICIRFLFWFL

SEQ ID NO: 6521 - protein, 17 aa, Artificial sequence
  synthetic peptide
HSKVTIICIRFLFWFLL

SEQ ID NO: 6522 - protein, 17 aa, Artificial sequence
  synthetic peptide
SKVTIICIRFLFWFLLL

SEQ ID NO: 6523 - protein, 17 aa, Artificial sequence
  synthetic peptide
KVTIICIRFLFWFLLLC

SEQ ID NO: 6524 - protein, 17 aa, Artificial sequence
  synthetic peptide
VTIICIRFLFWFLLLCM

SEQ ID NO: 6525 - protein, 17 aa, Artificial sequence
  synthetic peptide
TIICIRFLFWFLLLCML

SEQ ID NO: 6526 - protein, 17 aa, Artificial sequence
  synthetic peptide
IICIRFLFWFLLLCMLI

SEQ ID NO: 6527 - protein, 17 aa, Artificial sequence
  synthetic peptide
ICIRFLFWFLLLCMLIG

SEQ ID NO: 6528 - protein, 17 aa, Artificial sequence
  synthetic peptide
CIRFLFWFLLLCMLIGK

SEQ ID NO: 6529 - protein, 17 aa, Artificial sequence
  synthetic peptide
IRFLFWFLLLCMLIGKS

SEQ ID NO: 6530 - protein, 17 aa, Artificial sequence
  synthetic peptide
RFLFWFLLLCMLIGKSH

SEQ ID NO: 6531 - protein, 17 aa, Artificial sequence
  synthetic peptide
FLFWFLLLCMLIGKSHT

SEQ ID NO: 6532 - protein, 17 aa, Artificial sequence
  synthetic peptide
LFWFLLLCMLIGKSHTE

SEQ ID NO: 6533 - protein, 17 aa, Artificial sequence
  synthetic peptide
FWFLLLCMLIGKSHTED

SEQ ID NO: 6534 - protein, 17 aa, Artificial sequence
  synthetic peptide
WFLLLCMLIGKSHTEDD

SEQ ID NO: 6535 - protein, 17 aa, Artificial sequence
  synthetic peptide
FLLLCMLIGKSHTEDDI

SEQ ID NO: 6536 - protein, 17 aa, Artificial sequence
  synthetic peptide
LLLCMLIGKSHTEDDII

SEQ ID NO: 6537 - protein, 17 aa, Artificial sequence
  synthetic peptide
LLCMLIGKSHTEDDIII

SEQ ID NO: 6538 - protein, 17 aa, Artificial sequence
  synthetic peptide
LCMLIGKSHTEDDIIIA

SEQ ID NO: 6539 - protein, 17 aa, Artificial sequence
  synthetic peptide
CMLIGKSHTEDDIIIAT

SEQ ID NO: 6540 - protein, 17 aa, Artificial sequence
  synthetic peptide
MLIGKSHTEDDIIIATK

SEQ ID NO: 6541 - protein, 17 aa, Artificial sequence
  synthetic peptide
LIGKSHTEDDIIIATKN

SEQ ID NO: 6542 - protein, 17 aa, Artificial sequence
  synthetic peptide
IGKSHTEDDIIIATKNG

SEQ ID NO: 6543 - protein, 17 aa, Artificial sequence
  synthetic peptide
GKSHTEDDIIIATKNGK

SEQ ID NO: 6544 - protein, 17 aa, Artificial sequence
  synthetic peptide
KSHTEDDIIIATKNGKV

SEQ ID NO: 6545 - protein, 17 aa, Artificial sequence
  synthetic peptide
SHTEDDIIIATKNGKVR

SEQ ID NO: 6546 - protein, 17 aa, Artificial sequence
  synthetic peptide
HTEDDIIIATKNGKVRG

SEQ ID NO: 6547 - protein, 17 aa, Artificial sequence
  synthetic peptide
TEDDIIIATKNGKVRGM

SEQ ID NO: 6548 - protein, 17 aa, Artificial sequence
  synthetic peptide
EDDIIIATKNGKVRGMN

SEQ ID NO: 6549 - protein, 17 aa, Artificial sequence
  synthetic peptide
DDIIIATKNGKVRGMNL

SEQ ID NO: 6550 - protein, 17 aa, Artificial sequence
  synthetic peptide
DIIIATKNGKVRGMNLT

SEQ ID NO: 6551 - protein, 17 aa, Artificial sequence
  synthetic peptide
IIIATKNGKVRGMNLTV

SEQ ID NO: 6552 - protein, 17 aa, Artificial sequence
  synthetic peptide
IIATKNGKVRGMNLTVF

SEQ ID NO: 6553 - protein, 17 aa, Artificial sequence
  synthetic peptide
IATKNGKVRGMNLTVFG

SEQ ID NO: 6554 - protein, 17 aa, Artificial sequence
  synthetic peptide
ATKNGKVRGMNLTVFGG

SEQ ID NO: 6555 - protein, 17 aa, Artificial sequence
  synthetic peptide
TKNGKVRGMNLTVFGGT

SEQ ID NO: 6556 - protein, 17 aa, Artificial sequence
  synthetic peptide
KNGKVRGMNLTVFGGTV

SEQ ID NO: 6557 - protein, 17 aa, Artificial sequence
  synthetic peptide
NGKVRGMNLTVFGGTVT

SEQ ID NO: 6558 - protein, 17 aa, Artificial sequence
  synthetic peptide
GKVRGMNLTVFGGTVTA

SEQ ID NO: 6559 - protein, 17 aa, Artificial sequence
  synthetic peptide
KVRGMNLTVFGGTVTAF

SEQ ID NO: 6560 - protein, 17 aa, Artificial sequence
  synthetic peptide
VRGMNLTVFGGTVTAFL

SEQ ID NO: 6561 - protein, 17 aa, Artificial sequence
  synthetic peptide
RGMNLTVFGGTVTAFLG

SEQ ID NO: 6562 - protein, 17 aa, Artificial sequence
  synthetic peptide
GMNLTVFGGTVTAFLGI

SEQ ID NO: 6563 - protein, 17 aa, Artificial sequence
  synthetic peptide
MNLTVFGGTVTAFLGIP

SEQ ID NO: 6564 - protein, 17 aa, Artificial sequence
  synthetic peptide
NLTVFGGTVTAFLGIPY

SEQ ID NO: 6565 - protein, 17 aa, Artificial sequence
  synthetic peptide
LTVFGGTVTAFLGIPYA

SEQ ID NO: 6566 - protein, 17 aa, Artificial sequence
  synthetic peptide
TVFGGTVTAFLGIPYAQ

SEQ ID NO: 6567 - protein, 17 aa, Artificial sequence
  synthetic peptide
VFGGTVTAFLGIPYAQP

SEQ ID NO: 6568 - protein, 17 aa, Artificial sequence
  synthetic peptide
FGGTVTAFLGIPYAQPP

SEQ ID NO: 6569 - protein, 17 aa, Artificial sequence
  synthetic peptide
GGTVTAFLGIPYAQPPL

SEQ ID NO: 6570 - protein, 17 aa, Artificial sequence
  synthetic peptide
GTVTAFLGIPYAQPPLG

SEQ ID NO: 6571 - protein, 17 aa, Artificial sequence
  synthetic peptide
TVTAFLGIPYAQPPLGR

SEQ ID NO: 6572 - protein, 17 aa, Artificial sequence
  synthetic peptide
VTAFLGIPYAQPPLGRL

SEQ ID NO: 6573 - protein, 17 aa, Artificial sequence
  synthetic peptide
TAFLGIPYAQPPLGRLR

SEQ ID NO: 6574 - protein, 17 aa, Artificial sequence
  synthetic peptide
AFLGIPYAQPPLGRLRF

SEQ ID NO: 6575 - protein, 17 aa, Artificial sequence
  synthetic peptide
FLGIPYAQPPLGRLRFK

SEQ ID NO: 6576 - protein, 17 aa, Artificial sequence
  synthetic peptide
LGIPYAQPPLGRLRFKK

SEQ ID NO: 6577 - protein, 17 aa, Artificial sequence
  synthetic peptide
GIPYAQPPLGRLRFKKP

SEQ ID NO: 6578 - protein, 17 aa, Artificial sequence
  synthetic peptide
IPYAQPPLGRLRFKKPQ

SEQ ID NO: 6579 - protein, 17 aa, Artificial sequence
  synthetic peptide
PYAQPPLGRLRFKKPQS

SEQ ID NO: 6580 - protein, 17 aa, Artificial sequence
  synthetic peptide
YAQPPLGRLRFKKPQSL

SEQ ID NO: 6581 - protein, 17 aa, Artificial sequence
  synthetic peptide
AQPPLGRLRFKKPQSLT

SEQ ID NO: 6582 - protein, 17 aa, Artificial sequence
  synthetic peptide
QPPLGRLRFKKPQSLTK

SEQ ID NO: 6583 - protein, 17 aa, Artificial sequence
  synthetic peptide
PPLGRLRFKKPQSLTKW

SEQ ID NO: 6584 - protein, 17 aa, Artificial sequence
  synthetic peptide
PLGRLRFKKPQSLTKWS

SEQ ID NO: 6585 - protein, 17 aa, Artificial sequence
  synthetic peptide
LGRLRFKKPQSLTKWSD

SEQ ID NO: 6586 - protein, 17 aa, Artificial sequence
  synthetic peptide
GRLRFKKPQSLTKWSDI

SEQ ID NO: 6587 - protein, 17 aa, Artificial sequence
  synthetic peptide
RLRFKKPQSLTKWSDIW

SEQ ID NO: 6588 - protein, 17 aa, Artificial sequence
  synthetic peptide
LRFKKPQSLTKWSDIWN

SEQ ID NO: 6589 - protein, 17 aa, Artificial sequence
  synthetic peptide
RFKKPQSLTKWSDIWNA

SEQ ID NO: 6590 - protein, 17 aa, Artificial sequence
  synthetic peptide
FKKPQSLTKWSDIWNAT

SEQ ID NO: 6591 - protein, 17 aa, Artificial sequence
  synthetic peptide
KKPQSLTKWSDIWNATK

SEQ ID NO: 6592 - protein, 17 aa, Artificial sequence
  synthetic peptide
KPQSLTKWSDIWNATKY

SEQ ID NO: 6593 - protein, 17 aa, Artificial sequence
  synthetic peptide
PQSLTKWSDIWNATKYA

SEQ ID NO: 6594 - protein, 17 aa, Artificial sequence
  synthetic peptide
QSLTKWSDIWNATKYAN

SEQ ID NO: 6595 - protein, 17 aa, Artificial sequence
  synthetic peptide
SLTKWSDIWNATKYANS

SEQ ID NO: 6596 - protein, 17 aa, Artificial sequence
  synthetic peptide
LTKWSDIWNATKYANSC

SEQ ID NO: 6597 - protein, 17 aa, Artificial sequence
  synthetic peptide
TKWSDIWNATKYANSCC

SEQ ID NO: 6598 - protein, 17 aa, Artificial sequence
  synthetic peptide
KWSDIWNATKYANSCCQ

SEQ ID NO: 6599 - protein, 17 aa, Artificial sequence
  synthetic peptide
WSDIWNATKYANSCCQN

SEQ ID NO: 6600 - protein, 17 aa, Artificial sequence
  synthetic peptide
SDIWNATKYANSCCQNI

SEQ ID NO: 6601 - protein, 17 aa, Artificial sequence
  synthetic peptide
DIWNATKYANSCCQNID

SEQ ID NO: 6602 - protein, 17 aa, Artificial sequence
  synthetic peptide
IWNATKYANSCCQNIDQ

SEQ ID NO: 6603 - protein, 17 aa, Artificial sequence
  synthetic peptide
WNATKYANSCCQNIDQS

SEQ ID NO: 6604 - protein, 17 aa, Artificial sequence
  synthetic peptide
NATKYANSCCQNIDQSF

SEQ ID NO: 6605 - protein, 17 aa, Artificial sequence
  synthetic peptide
ATKYANSCCQNIDQSFP

SEQ ID NO: 6606 - protein, 17 aa, Artificial sequence
  synthetic peptide
TKYANSCCQNIDQSFPG

SEQ ID NO: 6607 - protein, 17 aa, Artificial sequence
  synthetic peptide
KYANSCCQNIDQSFPGF

SEQ ID NO: 6608 - protein, 17 aa, Artificial sequence
  synthetic peptide
YANSCCQNIDQSFPGFH

SEQ ID NO: 6609 - protein, 17 aa, Artificial sequence
  synthetic peptide
ANSCCQNIDQSFPGFHG

SEQ ID NO: 6610 - protein, 17 aa, Artificial sequence
  synthetic peptide
NSCCQNIDQSFPGFHGS

SEQ ID NO: 6611 - protein, 17 aa, Artificial sequence
  synthetic peptide
SCCQNIDQSFPGFHGSE

SEQ ID NO: 6612 - protein, 17 aa, Artificial sequence
  synthetic peptide
CCQNIDQSFPGFHGSEM

SEQ ID NO: 6613 - protein, 17 aa, Artificial sequence
  synthetic peptide
CQNIDQSFPGFHGSEMW

SEQ ID NO: 6614 - protein, 17 aa, Artificial sequence
  synthetic peptide
QNIDQSFPGFHGSEMWN

SEQ ID NO: 6615 - protein, 17 aa, Artificial sequence
  synthetic peptide
NIDQSFPGFHGSEMWNP

SEQ ID NO: 6616 - protein, 17 aa, Artificial sequence
  synthetic peptide
IDQSFPGFHGSEMWNPN

SEQ ID NO: 6617 - protein, 17 aa, Artificial sequence
  synthetic peptide
DQSFPGFHGSEMWNPNT

SEQ ID NO: 6618 - protein, 17 aa, Artificial sequence
  synthetic peptide
QSFPGFHGSEMWNPNTD

SEQ ID NO: 6619 - protein, 17 aa, Artificial sequence
  synthetic peptide
SFPGFHGSEMWNPNTDL

SEQ ID NO: 6620 - protein, 17 aa, Artificial sequence
  synthetic peptide
FPGFHGSEMWNPNTDLS

SEQ ID NO: 6621 - protein, 17 aa, Artificial sequence
  synthetic peptide
PGFHGSEMWNPNTDLSE

SEQ ID NO: 6622 - protein, 17 aa, Artificial sequence
  synthetic peptide
GFHGSEMWNPNTDLSED

SEQ ID NO: 6623 - protein, 17 aa, Artificial sequence
  synthetic peptide
FHGSEMWNPNTDLSEDC

SEQ ID NO: 6624 - protein, 17 aa, Artificial sequence
  synthetic peptide
HGSEMWNPNTDLSEDCL

SEQ ID NO: 6625 - protein, 17 aa, Artificial sequence
  synthetic peptide
GSEMWNPNTDLSEDCLY

SEQ ID NO: 6626 - protein, 17 aa, Artificial sequence
  synthetic peptide
SEMWNPNTDLSEDCLYL

SEQ ID NO: 6627 - protein, 17 aa, Artificial sequence
  synthetic peptide
EMWNPNTDLSEDCLYLN

SEQ ID NO: 6628 - protein, 17 aa, Artificial sequence
  synthetic peptide
MWNPNTDLSEDCLYLNV

SEQ ID NO: 6629 - protein, 17 aa, Artificial sequence
  synthetic peptide
WNPNTDLSEDCLYLNVW

SEQ ID NO: 6630 - protein, 17 aa, Artificial sequence
  synthetic peptide
NPNTDLSEDCLYLNVWI

SEQ ID NO: 6631 - protein, 17 aa, Artificial sequence
  synthetic peptide
PNTDLSEDCLYLNVWIP

SEQ ID NO: 6632 - protein, 17 aa, Artificial sequence
  synthetic peptide
NTDLSEDCLYLNVWIPA

SEQ ID NO: 6633 - protein, 17 aa, Artificial sequence
  synthetic peptide
TDLSEDCLYLNVWIPAP

SEQ ID NO: 6634 - protein, 17 aa, Artificial sequence
  synthetic peptide
DLSEDCLYLNVWIPAPK

SEQ ID NO: 6635 - protein, 17 aa, Artificial sequence
  synthetic peptide
LSEDCLYLNVWIPAPKP

SEQ ID NO: 6636 - protein, 17 aa, Artificial sequence
  synthetic peptide
SEDCLYLNVWIPAPKPK

SEQ ID NO: 6637 - protein, 17 aa, Artificial sequence
  synthetic peptide
EDCLYLNVWIPAPKPKN

SEQ ID NO: 6638 - protein, 17 aa, Artificial sequence
  synthetic peptide
DCLYLNVWIPAPKPKNA

SEQ ID NO: 6639 - protein, 17 aa, Artificial sequence
  synthetic peptide
CLYLNVWIPAPKPKNAT

SEQ ID NO: 6640 - protein, 17 aa, Artificial sequence
  synthetic peptide
LYLNVWIPAPKPKNATV

SEQ ID NO: 6641 - protein, 17 aa, Artificial sequence
  synthetic peptide
YLNVWIPAPKPKNATVL

SEQ ID NO: 6642 - protein, 17 aa, Artificial sequence
  synthetic peptide
LNVWIPAPKPKNATVLI

SEQ ID NO: 6643 - protein, 17 aa, Artificial sequence
  synthetic peptide
NVWIPAPKPKNATVLIW

SEQ ID NO: 6644 - protein, 17 aa, Artificial sequence
  synthetic peptide
VWIPAPKPKNATVLIWI

SEQ ID NO: 6645 - protein, 17 aa, Artificial sequence
  synthetic peptide
WIPAPKPKNATVLIWIY

SEQ ID NO: 6646 - protein, 17 aa, Artificial sequence
  synthetic peptide
IPAPKPKNATVLIWIYG

SEQ ID NO: 6647 - protein, 17 aa, Artificial sequence
  synthetic peptide
PAPKPKNATVLIWIYGG

SEQ ID NO: 6648 - protein, 17 aa, Artificial sequence
  synthetic peptide
APKPKNATVLIWIYGGG

SEQ ID NO: 6649 - protein, 17 aa, Artificial sequence
  synthetic peptide
PKPKNATVLIWIYGGGF

SEQ ID NO: 6650 - protein, 17 aa, Artificial sequence
  synthetic peptide
KPKNATVLIWIYGGGFQ

SEQ ID NO: 6651 - protein, 17 aa, Artificial sequence
  synthetic peptide
PKNATVLIWIYGGGFQT

SEQ ID NO: 6652 - protein, 17 aa, Artificial sequence
  synthetic peptide
KNATVLIWIYGGGFQTG

SEQ ID NO: 6653 - protein, 17 aa, Artificial sequence
  synthetic peptide
NATVLIWIYGGGFQTGT

SEQ ID NO: 6654 - protein, 17 aa, Artificial sequence
  synthetic peptide
ATVLIWIYGGGFQTGTS

SEQ ID NO: 6655 - protein, 17 aa, Artificial sequence
  synthetic peptide
TVLIWIYGGGFQTGTSS

SEQ ID NO: 6656 - protein, 17 aa, Artificial sequence
  synthetic peptide
VLIWIYGGGFQTGTSSL

SEQ ID NO: 6657 - protein, 17 aa, Artificial sequence
  synthetic peptide
LIWIYGGGFQTGTSSLH

SEQ ID NO: 6658 - protein, 17 aa, Artificial sequence
  synthetic peptide
IWIYGGGFQTGTSSLHV

SEQ ID NO: 6659 - protein, 17 aa, Artificial sequence
  synthetic peptide
WIYGGGFQTGTSSLHVY

SEQ ID NO: 6660 - protein, 17 aa, Artificial sequence
  synthetic peptide
IYGGGFQTGTSSLHVYD

SEQ ID NO: 6661 - protein, 17 aa, Artificial sequence
  synthetic peptide
YGGGFQTGTSSLHVYDG

SEQ ID NO: 6662 - protein, 17 aa, Artificial sequence
  synthetic peptide
GGGFQTGTSSLHVYDGK

SEQ ID NO: 6663 - protein, 17 aa, Artificial sequence
  synthetic peptide
GGFQTGTSSLHVYDGKF

SEQ ID NO: 6664 - protein, 17 aa, Artificial sequence
  synthetic peptide
GFQTGTSSLHVYDGKFL

SEQ ID NO: 6665 - protein, 17 aa, Artificial sequence
  synthetic peptide
FQTGTSSLHVYDGKFLA

SEQ ID NO: 6666 - protein, 17 aa, Artificial sequence
  synthetic peptide
QTGTSSLHVYDGKFLAR

SEQ ID NO: 6667 - protein, 17 aa, Artificial sequence
  synthetic peptide
TGTSSLHVYDGKFLARV

SEQ ID NO: 6668 - protein, 17 aa, Artificial sequence
  synthetic peptide
GTSSLHVYDGKFLARVE

SEQ ID NO: 6669 - protein, 17 aa, Artificial sequence
  synthetic peptide
TSSLHVYDGKFLARVER

SEQ ID NO: 6670 - protein, 17 aa, Artificial sequence
  synthetic peptide
SSLHVYDGKFLARVERV

SEQ ID NO: 6671 - protein, 17 aa, Artificial sequence
  synthetic peptide
SLHVYDGKFLARVERVI

SEQ ID NO: 6672 - protein, 17 aa, Artificial sequence
  synthetic peptide
LHVYDGKFLARVERVIV

SEQ ID NO: 6673 - protein, 17 aa, Artificial sequence
  synthetic peptide
HVYDGKFLARVERVIVV

SEQ ID NO: 6674 - protein, 17 aa, Artificial sequence
  synthetic peptide
VYDGKFLARVERVIVVS

SEQ ID NO: 6675 - protein, 17 aa, Artificial sequence
  synthetic peptide
YDGKFLARVERVIVVSM

SEQ ID NO: 6676 - protein, 17 aa, Artificial sequence
  synthetic peptide
DGKFLARVERVIVVSMN

SEQ ID NO: 6677 - protein, 17 aa, Artificial sequence
  synthetic peptide
GKFLARVERVIVVSMNY

SEQ ID NO: 6678 - protein, 17 aa, Artificial sequence
  synthetic peptide
KFLARVERVIVVSMNYR

SEQ ID NO: 6679 - protein, 17 aa, Artificial sequence
  synthetic peptide
FLARVERVIVVSMNYRV

SEQ ID NO: 6680 - protein, 17 aa, Artificial sequence
  synthetic peptide
LARVERVIVVSMNYRVG

SEQ ID NO: 6681 - protein, 17 aa, Artificial sequence
  synthetic peptide
ARVERVIVVSMNYRVGA

SEQ ID NO: 6682 - protein, 17 aa, Artificial sequence
  synthetic peptide
RVERVIVVSMNYRVGAL

SEQ ID NO: 6683 - protein, 17 aa, Artificial sequence
  synthetic peptide
VERVIVVSMNYRVGALG

SEQ ID NO: 6684 - protein, 17 aa, Artificial sequence
  synthetic peptide
ERVIVVSMNYRVGALGF

SEQ ID NO: 6685 - protein, 17 aa, Artificial sequence
  synthetic peptide
RVIVVSMNYRVGALGFL

SEQ ID NO: 6686 - protein, 17 aa, Artificial sequence
  synthetic peptide
VIVVSMNYRVGALGFLA

SEQ ID NO: 6687 - protein, 17 aa, Artificial sequence
  synthetic peptide
IVVSMNYRVGALGFLAL

SEQ ID NO: 6688 - protein, 17 aa, Artificial sequence
  synthetic peptide
VVSMNYRVGALGFLALP

SEQ ID NO: 6689 - protein, 17 aa, Artificial sequence
  synthetic peptide
VSMNYRVGALGFLALPG

SEQ ID NO: 6690 - protein, 17 aa, Artificial sequence
  synthetic peptide
SMNYRVGALGFLALPGN

SEQ ID NO: 6691 - protein, 17 aa, Artificial sequence
  synthetic peptide
MNYRVGALGFLALPGNP

SEQ ID NO: 6692 - protein, 17 aa, Artificial sequence
  synthetic peptide
NYRVGALGFLALPGNPE

SEQ ID NO: 6693 - protein, 17 aa, Artificial sequence
  synthetic peptide
YRVGALGFLALPGNPEA

SEQ ID NO: 6694 - protein, 17 aa, Artificial sequence
  synthetic peptide
RVGALGFLALPGNPEAP

SEQ ID NO: 6695 - protein, 17 aa, Artificial sequence
  synthetic peptide
VGALGFLALPGNPEAPG

SEQ ID NO: 6696 - protein, 17 aa, Artificial sequence
  synthetic peptide
GALGFLALPGNPEAPGN

SEQ ID NO: 6697 - protein, 17 aa, Artificial sequence
  synthetic peptide
ALGFLALPGNPEAPGNM

SEQ ID NO: 6698 - protein, 17 aa, Artificial sequence
  synthetic peptide
LGFLALPGNPEAPGNMG

SEQ ID NO: 6699 - protein, 17 aa, Artificial sequence
  synthetic peptide
GFLALPGNPEAPGNMGL

SEQ ID NO: 6700 - protein, 17 aa, Artificial sequence
  synthetic peptide
FLALPGNPEAPGNMGLF

SEQ ID NO: 6701 - protein, 17 aa, Artificial sequence
  synthetic peptide
LALPGNPEAPGNMGLFD

SEQ ID NO: 6702 - protein, 17 aa, Artificial sequence
  synthetic peptide
ALPGNPEAPGNMGLFDQ

SEQ ID NO: 6703 - protein, 17 aa, Artificial sequence
  synthetic peptide
LPGNPEAPGNMGLFDQQ

SEQ ID NO: 6704 - protein, 17 aa, Artificial sequence
  synthetic peptide
PGNPEAPGNMGLFDQQL

SEQ ID NO: 6705 - protein, 17 aa, Artificial sequence
  synthetic peptide
GNPEAPGNMGLFDQQLA

SEQ ID NO: 6706 - protein, 17 aa, Artificial sequence
  synthetic peptide
NPEAPGNMGLFDQQLAL

SEQ ID NO: 6707 - protein, 17 aa, Artificial sequence
  synthetic peptide
PEAPGNMGLFDQQLALQ

SEQ ID NO: 6708 - protein, 17 aa, Artificial sequence
  synthetic peptide
EAPGNMGLFDQQLALQW

SEQ ID NO: 6709 - protein, 17 aa, Artificial sequence
  synthetic peptide
APGNMGLFDQQLALQWV

SEQ ID NO: 6710 - protein, 17 aa, Artificial sequence
  synthetic peptide
PGNMGLFDQQLALQWVQ

SEQ ID NO: 6711 - protein, 17 aa, Artificial sequence
  synthetic peptide
GNMGLFDQQLALQWVQK

SEQ ID NO: 6712 - protein, 17 aa, Artificial sequence
  synthetic peptide
NMGLFDQQLALQWVQKN

SEQ ID NO: 6713 - protein, 17 aa, Artificial sequence
  synthetic peptide
MGLFDQQLALQWVQKNI

SEQ ID NO: 6714 - protein, 17 aa, Artificial sequence
  synthetic peptide
GLFDQQLALQWVQKNIA

SEQ ID NO: 6715 - protein, 17 aa, Artificial sequence
  synthetic peptide
LFDQQLALQWVQKNIAA

SEQ ID NO: 6716 - protein, 17 aa, Artificial sequence
  synthetic peptide
FDQQLALQWVQKNIAAF

SEQ ID NO: 6717 - protein, 17 aa, Artificial sequence
  synthetic peptide
DQQLALQWVQKNIAAFG

SEQ ID NO: 6718 - protein, 17 aa, Artificial sequence
  synthetic peptide
QQLALQWVQKNIAAFGG

SEQ ID NO: 6719 - protein, 17 aa, Artificial sequence
  synthetic peptide
QLALQWVQKNIAAFGGN

SEQ ID NO: 6720 - protein, 17 aa, Artificial sequence
  synthetic peptide
LALQWVQKNIAAFGGNP

SEQ ID NO: 6721 - protein, 17 aa, Artificial sequence
  synthetic peptide
ALQWVQKNIAAFGGNPK

SEQ ID NO: 6722 - protein, 17 aa, Artificial sequence
  synthetic peptide
LQWVQKNIAAFGGNPKS

SEQ ID NO: 6723 - protein, 17 aa, Artificial sequence
  synthetic peptide
QWVQKNIAAFGGNPKSV

SEQ ID NO: 6724 - protein, 17 aa, Artificial sequence
  synthetic peptide
WVQKNIAAFGGNPKSVT

SEQ ID NO: 6725 - protein, 17 aa, Artificial sequence
  synthetic peptide
VQKNIAAFGGNPKSVTL

SEQ ID NO: 6726 - protein, 17 aa, Artificial sequence
  synthetic peptide
QKNIAAFGGNPKSVTLF

SEQ ID NO: 6727 - protein, 17 aa, Artificial sequence
  synthetic peptide
KNIAAFGGNPKSVTLFG

SEQ ID NO: 6728 - protein, 17 aa, Artificial sequence
  synthetic peptide
NIAAFGGNPKSVTLFGE

SEQ ID NO: 6729 - protein, 17 aa, Artificial sequence
  synthetic peptide
IAAFGGNPKSVTLFGES

SEQ ID NO: 6730 - protein, 17 aa, Artificial sequence
  synthetic peptide
AAFGGNPKSVTLFGESA

SEQ ID NO: 6731 - protein, 17 aa, Artificial sequence
  synthetic peptide
AFGGNPKSVTLFGESAG

SEQ ID NO: 6732 - protein, 17 aa, Artificial sequence
  synthetic peptide
FGGNPKSVTLFGESAGA

SEQ ID NO: 6733 - protein, 17 aa, Artificial sequence
  synthetic peptide
GGNPKSVTLFGESAGAA

SEQ ID NO: 6734 - protein, 17 aa, Artificial sequence
  synthetic peptide
GNPKSVTLFGESAGAAS

SEQ ID NO: 6735 - protein, 17 aa, Artificial sequence
  synthetic peptide
NPKSVTLFGESAGAASV

SEQ ID NO: 6736 - protein, 17 aa, Artificial sequence
  synthetic peptide
PKSVTLFGESAGAASVS

SEQ ID NO: 6737 - protein, 17 aa, Artificial sequence
  synthetic peptide
KSVTLFGESAGAASVSL

SEQ ID NO: 6738 - protein, 17 aa, Artificial sequence
  synthetic peptide
SVTLFGESAGAASVSLH

SEQ ID NO: 6739 - protein, 17 aa, Artificial sequence
  synthetic peptide
VTLFGESAGAASVSLHL

SEQ ID NO: 6740 - protein, 17 aa, Artificial sequence
  synthetic peptide
TLFGESAGAASVSLHLL

SEQ ID NO: 6741 - protein, 17 aa, Artificial sequence
  synthetic peptide
LFGESAGAASVSLHLLS

SEQ ID NO: 6742 - protein, 17 aa, Artificial sequence
  synthetic peptide
FGESAGAASVSLHLLSP

SEQ ID NO: 6743 - protein, 17 aa, Artificial sequence
  synthetic peptide
GESAGAASVSLHLLSPG

SEQ ID NO: 6744 - protein, 17 aa, Artificial sequence
  synthetic peptide
ESAGAASVSLHLLSPGS

SEQ ID NO: 6745 - protein, 17 aa, Artificial sequence
  synthetic peptide
SAGAASVSLHLLSPGSH

SEQ ID NO: 6746 - protein, 17 aa, Artificial sequence
  synthetic peptide
AGAASVSLHLLSPGSHS

SEQ ID NO: 6747 - protein, 17 aa, Artificial sequence
  synthetic peptide
GAASVSLHLLSPGSHSL

SEQ ID NO: 6748 - protein, 17 aa, Artificial sequence
  synthetic peptide
AASVSLHLLSPGSHSLF

SEQ ID NO: 6749 - protein, 17 aa, Artificial sequence
  synthetic peptide
ASVSLHLLSPGSHSLFT

SEQ ID NO: 6750 - protein, 17 aa, Artificial sequence
  synthetic peptide
SVSLHLLSPGSHSLFTR

SEQ ID NO: 6751 - protein, 17 aa, Artificial sequence
  synthetic peptide
VSLHLLSPGSHSLFTRA

SEQ ID NO: 6752 - protein, 17 aa, Artificial sequence
  synthetic peptide
SLHLLSPGSHSLFTRAI

SEQ ID NO: 6753 - protein, 17 aa, Artificial sequence
  synthetic peptide
LHLLSPGSHSLFTRAIL

SEQ ID NO: 6754 - protein, 17 aa, Artificial sequence
  synthetic peptide
HLLSPGSHSLFTRAILQ

SEQ ID NO: 6755 - protein, 17 aa, Artificial sequence
  synthetic peptide
LLSPGSHSLFTRAILQS

SEQ ID NO: 6756 - protein, 17 aa, Artificial sequence
  synthetic peptide
LSPGSHSLFTRAILQSG

SEQ ID NO: 6757 - protein, 17 aa, Artificial sequence
  synthetic peptide
SPGSHSLFTRAILQSGS

SEQ ID NO: 6758 - protein, 17 aa, Artificial sequence
  synthetic peptide
PGSHSLFTRAILQSGSF

SEQ ID NO: 6759 - protein, 17 aa, Artificial sequence
  synthetic peptide
GSHSLFTRAILQSGSFN

SEQ ID NO: 6760 - protein, 17 aa, Artificial sequence
  synthetic peptide
SHSLFTRAILQSGSFNA

SEQ ID NO: 6761 - protein, 17 aa, Artificial sequence
  synthetic peptide
HSLFTRAILQSGSFNAP

SEQ ID NO: 6762 - protein, 17 aa, Artificial sequence
  synthetic peptide
SLFTRAILQSGSFNAPW

SEQ ID NO: 6763 - protein, 17 aa, Artificial sequence
  synthetic peptide
LFTRAILQSGSFNAPWA

SEQ ID NO: 6764 - protein, 17 aa, Artificial sequence
  synthetic peptide
FTRAILQSGSFNAPWAV

SEQ ID NO: 6765 - protein, 17 aa, Artificial sequence
  synthetic peptide
TRAILQSGSFNAPWAVT

SEQ ID NO: 6766 - protein, 17 aa, Artificial sequence
  synthetic peptide
RAILQSGSFNAPWAVTS

SEQ ID NO: 6767 - protein, 17 aa, Artificial sequence
  synthetic peptide
AILQSGSFNAPWAVTSL

SEQ ID NO: 6768 - protein, 17 aa, Artificial sequence
  synthetic peptide
ILQSGSFNAPWAVTSLY

SEQ ID NO: 6769 - protein, 17 aa, Artificial sequence
  synthetic peptide
LQSGSFNAPWAVTSLYE

SEQ ID NO: 6770 - protein, 17 aa, Artificial sequence
  synthetic peptide
QSGSFNAPWAVTSLYEA

SEQ ID NO: 6771 - protein, 17 aa, Artificial sequence
  synthetic peptide
SGSFNAPWAVTSLYEAR

SEQ ID NO: 6772 - protein, 17 aa, Artificial sequence
  synthetic peptide
GSFNAPWAVTSLYEARN

SEQ ID NO: 6773 - protein, 17 aa, Artificial sequence
  synthetic peptide
SFNAPWAVTSLYEARNR

SEQ ID NO: 6774 - protein, 17 aa, Artificial sequence
  synthetic peptide
FNAPWAVTSLYEARNRT

SEQ ID NO: 6775 - protein, 17 aa, Artificial sequence
  synthetic peptide
NAPWAVTSLYEARNRTL

SEQ ID NO: 6776 - protein, 17 aa, Artificial sequence
  synthetic peptide
APWAVTSLYEARNRTLN

SEQ ID NO: 6777 - protein, 17 aa, Artificial sequence
  synthetic peptide
PWAVTSLYEARNRTLNL

SEQ ID NO: 6778 - protein, 17 aa, Artificial sequence
  synthetic peptide
WAVTSLYEARNRTLNLA

SEQ ID NO: 6779 - protein, 17 aa, Artificial sequence
  synthetic peptide
AVTSLYEARNRTLNLAK

SEQ ID NO: 6780 - protein, 17 aa, Artificial sequence
  synthetic peptide
VTSLYEARNRTLNLAKL

SEQ ID NO: 6781 - protein, 17 aa, Artificial sequence
  synthetic peptide
TSLYEARNRTLNLAKLT

SEQ ID NO: 6782 - protein, 17 aa, Artificial sequence
  synthetic peptide
SLYEARNRTLNLAKLTG

SEQ ID NO: 6783 - protein, 17 aa, Artificial sequence
  synthetic peptide
LYEARNRTLNLAKLTGC

SEQ ID NO: 6784 - protein, 17 aa, Artificial sequence
  synthetic peptide
YEARNRTLNLAKLTGCS

SEQ ID NO: 6785 - protein, 17 aa, Artificial sequence
  synthetic peptide
EARNRTLNLAKLTGCSR

SEQ ID NO: 6786 - protein, 17 aa, Artificial sequence
  synthetic peptide
ARNRTLNLAKLTGCSRE

SEQ ID NO: 6787 - protein, 17 aa, Artificial sequence
  synthetic peptide
RNRTLNLAKLTGCSREN

SEQ ID NO: 6788 - protein, 17 aa, Artificial sequence
  synthetic peptide
NRTLNLAKLTGCSRENE

SEQ ID NO: 6789 - protein, 17 aa, Artificial sequence
  synthetic peptide
RTLNLAKLTGCSRENET

SEQ ID NO: 6790 - protein, 17 aa, Artificial sequence
  synthetic peptide
TLNLAKLTGCSRENETE

SEQ ID NO: 6791 - protein, 17 aa, Artificial sequence
  synthetic peptide
LNLAKLTGCSRENETEI

SEQ ID NO: 6792 - protein, 17 aa, Artificial sequence
  synthetic peptide
NLAKLTGCSRENETEII

SEQ ID NO: 6793 - protein, 17 aa, Artificial sequence
  synthetic peptide
LAKLTGCSRENETEIIK

SEQ ID NO: 6794 - protein, 17 aa, Artificial sequence
  synthetic peptide
AKLTGCSRENETEIIKC

SEQ ID NO: 6795 - protein, 17 aa, Artificial sequence
  synthetic peptide
KLTGCSRENETEIIKCL

SEQ ID NO: 6796 - protein, 17 aa, Artificial sequence
  synthetic peptide
LTGCSRENETEIIKCLR

SEQ ID NO: 6797 - protein, 17 aa, Artificial sequence
  synthetic peptide
TGCSRENETEIIKCLRN

SEQ ID NO: 6798 - protein, 17 aa, Artificial sequence
  synthetic peptide
GCSRENETEIIKCLRNK

SEQ ID NO: 6799 - protein, 17 aa, Artificial sequence
  synthetic peptide
CSRENETEIIKCLRNKD

SEQ ID NO: 6800 - protein, 17 aa, Artificial sequence
  synthetic peptide
SRENETEIIKCLRNKDP

SEQ ID NO: 6801 - protein, 17 aa, Artificial sequence
  synthetic peptide
RENETEIIKCLRNKDPQ

SEQ ID NO: 6802 - protein, 17 aa, Artificial sequence
  synthetic peptide
ENETEIIKCLRNKDPQE

SEQ ID NO: 6803 - protein, 17 aa, Artificial sequence
  synthetic peptide
NETEIIKCLRNKDPQEI

SEQ ID NO: 6804 - protein, 17 aa, Artificial sequence
  synthetic peptide
ETEIIKCLRNKDPQEIL

SEQ ID NO: 6805 - protein, 17 aa, Artificial sequence
  synthetic peptide
TEIIKCLRNKDPQEILL

SEQ ID NO: 6806 - protein, 17 aa, Artificial sequence
  synthetic peptide
EIIKCLRNKDPQEILLN

SEQ ID NO: 6807 - protein, 17 aa, Artificial sequence
  synthetic peptide
IIKCLRNKDPQEILLNE

SEQ ID NO: 6808 - protein, 17 aa, Artificial sequence
  synthetic peptide
IKCLRNKDPQEILLNEA

SEQ ID NO: 6809 - protein, 17 aa, Artificial sequence
  synthetic peptide
KCLRNKDPQEILLNEAF

SEQ ID NO: 6810 - protein, 17 aa, Artificial sequence
  synthetic peptide
CLRNKDPQEILLNEAFV

SEQ ID NO: 6811 - protein, 17 aa, Artificial sequence
  synthetic peptide
LRNKDPQEILLNEAFVV

SEQ ID NO: 6812 - protein, 17 aa, Artificial sequence
  synthetic peptide
RNKDPQEILLNEAFVVP

SEQ ID NO: 6813 - protein, 17 aa, Artificial sequence
  synthetic peptide
NKDPQEILLNEAFVVPY

SEQ ID NO: 6814 - protein, 17 aa, Artificial sequence
  synthetic peptide
KDPQEILLNEAFVVPYG

SEQ ID NO: 6815 - protein, 17 aa, Artificial sequence
  synthetic peptide
DPQEILLNEAFVVPYGT

SEQ ID NO: 6816 - protein, 17 aa, Artificial sequence
  synthetic peptide
PQEILLNEAFVVPYGTP

SEQ ID NO: 6817 - protein, 17 aa, Artificial sequence
  synthetic peptide
QEILLNEAFVVPYGTPL

SEQ ID NO: 6818 - protein, 17 aa, Artificial sequence
  synthetic peptide
EILLNEAFVVPYGTPLS

SEQ ID NO: 6819 - protein, 17 aa, Artificial sequence
  synthetic peptide
ILLNEAFVVPYGTPLSV

SEQ ID NO: 6820 - protein, 17 aa, Artificial sequence
  synthetic peptide
LLNEAFVVPYGTPLSVN

SEQ ID NO: 6821 - protein, 17 aa, Artificial sequence
  synthetic peptide
LNEAFVVPYGTPLSVNF

SEQ ID NO: 6822 - protein, 17 aa, Artificial sequence
  synthetic peptide
NEAFVVPYGTPLSVNFG

SEQ ID NO: 6823 - protein, 17 aa, Artificial sequence
  synthetic peptide
EAFVVPYGTPLSVNFGP

SEQ ID NO: 6824 - protein, 17 aa, Artificial sequence
  synthetic peptide
AFVVPYGTPLSVNFGPT

SEQ ID NO: 6825 - protein, 17 aa, Artificial sequence
  synthetic peptide
FVVPYGTPLSVNFGPTV

SEQ ID NO: 6826 - protein, 17 aa, Artificial sequence
  synthetic peptide
VVPYGTPLSVNFGPTVD

SEQ ID NO: 6827 - protein, 17 aa, Artificial sequence
  synthetic peptide
VPYGTPLSVNFGPTVDG

SEQ ID NO: 6828 - protein, 17 aa, Artificial sequence
  synthetic peptide
PYGTPLSVNFGPTVDGD

SEQ ID NO: 6829 - protein, 17 aa, Artificial sequence
  synthetic peptide
YGTPLSVNFGPTVDGDF

SEQ ID NO: 6830 - protein, 17 aa, Artificial sequence
  synthetic peptide
GTPLSVNFGPTVDGDFL

SEQ ID NO: 6831 - protein, 17 aa, Artificial sequence
  synthetic peptide
TPLSVNFGPTVDGDFLT

SEQ ID NO: 6832 - protein, 17 aa, Artificial sequence
  synthetic peptide
PLSVNFGPTVDGDFLTD

SEQ ID NO: 6833 - protein, 17 aa, Artificial sequence
  synthetic peptide
LSVNFGPTVDGDFLTDM

SEQ ID NO: 6834 - protein, 17 aa, Artificial sequence
  synthetic peptide
SVNFGPTVDGDFLTDMP

SEQ ID NO: 6835 - protein, 17 aa, Artificial sequence
  synthetic peptide
VNFGPTVDGDFLTDMPD

SEQ ID NO: 6836 - protein, 17 aa, Artificial sequence
  synthetic peptide
NFGPTVDGDFLTDMPDI

SEQ ID NO: 6837 - protein, 17 aa, Artificial sequence
  synthetic peptide
FGPTVDGDFLTDMPDIL

SEQ ID NO: 6838 - protein, 17 aa, Artificial sequence
  synthetic peptide
GPTVDGDFLTDMPDILL

SEQ ID NO: 6839 - protein, 17 aa, Artificial sequence
  synthetic peptide
PTVDGDFLTDMPDILLE

SEQ ID NO: 6840 - protein, 17 aa, Artificial sequence
  synthetic peptide
TVDGDFLTDMPDILLEL

SEQ ID NO: 6841 - protein, 17 aa, Artificial sequence
  synthetic peptide
VDGDFLTDMPDILLELG

SEQ ID NO: 6842 - protein, 17 aa, Artificial sequence
  synthetic peptide
DGDFLTDMPDILLELGQ

SEQ ID NO: 6843 - protein, 17 aa, Artificial sequence
  synthetic peptide
GDFLTDMPDILLELGQF

SEQ ID NO: 6844 - protein, 17 aa, Artificial sequence
  synthetic peptide
DFLTDMPDILLELGQFK

SEQ ID NO: 6845 - protein, 17 aa, Artificial sequence
  synthetic peptide
FLTDMPDILLELGQFKK

SEQ ID NO: 6846 - protein, 17 aa, Artificial sequence
  synthetic peptide
LTDMPDILLELGQFKKT

SEQ ID NO: 6847 - protein, 17 aa, Artificial sequence
  synthetic peptide
TDMPDILLELGQFKKTQ

SEQ ID NO: 6848 - protein, 17 aa, Artificial sequence
  synthetic peptide
DMPDILLELGQFKKTQI

SEQ ID NO: 6849 - protein, 17 aa, Artificial sequence
  synthetic peptide
MPDILLELGQFKKTQIL

SEQ ID NO: 6850 - protein, 17 aa, Artificial sequence
  synthetic peptide
PDILLELGQFKKTQILV

SEQ ID NO: 6851 - protein, 17 aa, Artificial sequence
  synthetic peptide
DILLELGQFKKTQILVG

SEQ ID NO: 6852 - protein, 17 aa, Artificial sequence
  synthetic peptide
ILLELGQFKKTQILVGV

SEQ ID NO: 6853 - protein, 17 aa, Artificial sequence
  synthetic peptide
LLELGQFKKTQILVGVN

SEQ ID NO: 6854 - protein, 17 aa, Artificial sequence
  synthetic peptide
LELGQFKKTQILVGVNK

SEQ ID NO: 6855 - protein, 17 aa, Artificial sequence
  synthetic peptide
ELGQFKKTQILVGVNKD

SEQ ID NO: 6856 - protein, 17 aa, Artificial sequence
  synthetic peptide
LGQFKKTQILVGVNKDE

SEQ ID NO: 6857 - protein, 17 aa, Artificial sequence
  synthetic peptide
GQFKKTQILVGVNKDEG

SEQ ID NO: 6858 - protein, 17 aa, Artificial sequence
  synthetic peptide
QFKKTQILVGVNKDEGT

SEQ ID NO: 6859 - protein, 17 aa, Artificial sequence
  synthetic peptide
FKKTQILVGVNKDEGTA

SEQ ID NO: 6860 - protein, 17 aa, Artificial sequence
  synthetic peptide
KKTQILVGVNKDEGTAF

SEQ ID NO: 6861 - protein, 17 aa, Artificial sequence
  synthetic peptide
KTQILVGVNKDEGTAFL

SEQ ID NO: 6862 - protein, 17 aa, Artificial sequence
  synthetic peptide
TQILVGVNKDEGTAFLV

SEQ ID NO: 6863 - protein, 17 aa, Artificial sequence
  synthetic peptide
QILVGVNKDEGTAFLVY

SEQ ID NO: 6864 - protein, 17 aa, Artificial sequence
  synthetic peptide
ILVGVNKDEGTAFLVYG

SEQ ID NO: 6865 - protein, 17 aa, Artificial sequence
  synthetic peptide
LVGVNKDEGTAFLVYGA

SEQ ID NO: 6866 - protein, 17 aa, Artificial sequence
  synthetic peptide
VGVNKDEGTAFLVYGAP

SEQ ID NO: 6867 - protein, 17 aa, Artificial sequence
  synthetic peptide
GVNKDEGTAFLVYGAPG

SEQ ID NO: 6868 - protein, 17 aa, Artificial sequence
  synthetic peptide
VNKDEGTAFLVYGAPGF

SEQ ID NO: 6869 - protein, 17 aa, Artificial sequence
  synthetic peptide
NKDEGTAFLVYGAPGFS

SEQ ID NO: 6870 - protein, 17 aa, Artificial sequence
  synthetic peptide
KDEGTAFLVYGAPGFSK

SEQ ID NO: 6871 - protein, 17 aa, Artificial sequence
  synthetic peptide
DEGTAFLVYGAPGFSKD

SEQ ID NO: 6872 - protein, 17 aa, Artificial sequence
  synthetic peptide
EGTAFLVYGAPGFSKDN

SEQ ID NO: 6873 - protein, 17 aa, Artificial sequence
  synthetic peptide
GTAFLVYGAPGFSKDNN

SEQ ID NO: 6874 - protein, 17 aa, Artificial sequence
  synthetic peptide
TAFLVYGAPGFSKDNNS

SEQ ID NO: 6875 - protein, 17 aa, Artificial sequence
  synthetic peptide
AFLVYGAPGFSKDNNSI

SEQ ID NO: 6876 - protein, 17 aa, Artificial sequence
  synthetic peptide
FLVYGAPGFSKDNNSII

SEQ ID NO: 6877 - protein, 17 aa, Artificial sequence
  synthetic peptide
LVYGAPGFSKDNNSIIT

SEQ ID NO: 6878 - protein, 17 aa, Artificial sequence
  synthetic peptide
VYGAPGFSKDNNSIITR

SEQ ID NO: 6879 - protein, 17 aa, Artificial sequence
  synthetic peptide
YGAPGFSKDNNSIITRK

SEQ ID NO: 6880 - protein, 17 aa, Artificial sequence
  synthetic peptide
GAPGFSKDNNSIITRKE

SEQ ID NO: 6881 - protein, 17 aa, Artificial sequence
  synthetic peptide
APGFSKDNNSIITRKEF

SEQ ID NO: 6882 - protein, 17 aa, Artificial sequence
  synthetic peptide
PGFSKDNNSIITRKEFQ

SEQ ID NO: 6883 - protein, 17 aa, Artificial sequence
  synthetic peptide
GFSKDNNSIITRKEFQE

SEQ ID NO: 6884 - protein, 17 aa, Artificial sequence
  synthetic peptide
FSKDNNSIITRKEFQEG

SEQ ID NO: 6885 - protein, 17 aa, Artificial sequence
  synthetic peptide
SKDNNSIITRKEFQEGL

SEQ ID NO: 6886 - protein, 17 aa, Artificial sequence
  synthetic peptide
KDNNSIITRKEFQEGLK

SEQ ID NO: 6887 - protein, 17 aa, Artificial sequence
  synthetic peptide
DNNSIITRKEFQEGLKI

SEQ ID NO: 6888 - protein, 17 aa, Artificial sequence
  synthetic peptide
NNSIITRKEFQEGLKIF

SEQ ID NO: 6889 - protein, 17 aa, Artificial sequence
  synthetic peptide
NSIITRKEFQEGLKIFF

SEQ ID NO: 6890 - protein, 17 aa, Artificial sequence
  synthetic peptide
SIITRKEFQEGLKIFFP

SEQ ID NO: 6891 - protein, 17 aa, Artificial sequence
  synthetic peptide
IITRKEFQEGLKIFFPG

SEQ ID NO: 6892 - protein, 17 aa, Artificial sequence
  synthetic peptide
ITRKEFQEGLKIFFPGV

SEQ ID NO: 6893 - protein, 17 aa, Artificial sequence
  synthetic peptide
TRKEFQEGLKIFFPGVS

SEQ ID NO: 6894 - protein, 17 aa, Artificial sequence
  synthetic peptide
RKEFQEGLKIFFPGVSE

SEQ ID NO: 6895 - protein, 17 aa, Artificial sequence
  synthetic peptide
KEFQEGLKIFFPGVSEF

SEQ ID NO: 6896 - protein, 17 aa, Artificial sequence
  synthetic peptide
EFQEGLKIFFPGVSEFG

SEQ ID NO: 6897 - protein, 17 aa, Artificial sequence
  synthetic peptide
FQEGLKIFFPGVSEFGK

SEQ ID NO: 6898 - protein, 17 aa, Artificial sequence
  synthetic peptide
QEGLKIFFPGVSEFGKE

SEQ ID NO: 6899 - protein, 17 aa, Artificial sequence
  synthetic peptide
EGLKIFFPGVSEFGKES

SEQ ID NO: 6900 - protein, 17 aa, Artificial sequence
  synthetic peptide
GLKIFFPGVSEFGKESI

SEQ ID NO: 6901 - protein, 17 aa, Artificial sequence
  synthetic peptide
LKIFFPGVSEFGKESIL

SEQ ID NO: 6902 - protein, 17 aa, Artificial sequence
  synthetic peptide
KIFFPGVSEFGKESILF

SEQ ID NO: 6903 - protein, 17 aa, Artificial sequence
  synthetic peptide
IFFPGVSEFGKESILFH

SEQ ID NO: 6904 - protein, 17 aa, Artificial sequence
  synthetic peptide
FFPGVSEFGKESILFHY

SEQ ID NO: 6905 - protein, 17 aa, Artificial sequence
  synthetic peptide
FPGVSEFGKESILFHYT

SEQ ID NO: 6906 - protein, 17 aa, Artificial sequence
  synthetic peptide
PGVSEFGKESILFHYTD

SEQ ID NO: 6907 - protein, 17 aa, Artificial sequence
  synthetic peptide
GVSEFGKESILFHYTDW

SEQ ID NO: 6908 - protein, 17 aa, Artificial sequence
  synthetic peptide
VSEFGKESILFHYTDWV

SEQ ID NO: 6909 - protein, 17 aa, Artificial sequence
  synthetic peptide
SEFGKESILFHYTDWVD

SEQ ID NO: 6910 - protein, 17 aa, Artificial sequence
  synthetic peptide
EFGKESILFHYTDWVDD

SEQ ID NO: 6911 - protein, 17 aa, Artificial sequence
  synthetic peptide
FGKESILFHYTDWVDDQ

SEQ ID NO: 6912 - protein, 17 aa, Artificial sequence
  synthetic peptide
GKESILFHYTDWVDDQR

SEQ ID NO: 6913 - protein, 17 aa, Artificial sequence
  synthetic peptide
KESILFHYTDWVDDQRP

SEQ ID NO: 6914 - protein, 17 aa, Artificial sequence
  synthetic peptide
ESILFHYTDWVDDQRPE

SEQ ID NO: 6915 - protein, 17 aa, Artificial sequence
  synthetic peptide
SILFHYTDWVDDQRPEN

SEQ ID NO: 6916 - protein, 17 aa, Artificial sequence
  synthetic peptide
ILFHYTDWVDDQRPENY

SEQ ID NO: 6917 - protein, 17 aa, Artificial sequence
  synthetic peptide
LFHYTDWVDDQRPENYR

SEQ ID NO: 6918 - protein, 17 aa, Artificial sequence
  synthetic peptide
FHYTDWVDDQRPENYRE

SEQ ID NO: 6919 - protein, 17 aa, Artificial sequence
  synthetic peptide
HYTDWVDDQRPENYREA

SEQ ID NO: 6920 - protein, 17 aa, Artificial sequence
  synthetic peptide
YTDWVDDQRPENYREAL

SEQ ID NO: 6921 - protein, 17 aa, Artificial sequence
  synthetic peptide
TDWVDDQRPENYREALG

SEQ ID NO: 6922 - protein, 17 aa, Artificial sequence
  synthetic peptide
DWVDDQRPENYREALGD

SEQ ID NO: 6923 - protein, 17 aa, Artificial sequence
  synthetic peptide
WVDDQRPENYREALGDV

SEQ ID NO: 6924 - protein, 17 aa, Artificial sequence
  synthetic peptide
VDDQRPENYREALGDVV

SEQ ID NO: 6925 - protein, 17 aa, Artificial sequence
  synthetic peptide
DDQRPENYREALGDVVG

SEQ ID NO: 6926 - protein, 17 aa, Artificial sequence
  synthetic peptide
DQRPENYREALGDVVGD

SEQ ID NO: 6927 - protein, 17 aa, Artificial sequence
  synthetic peptide
QRPENYREALGDVVGDY

SEQ ID NO: 6928 - protein, 17 aa, Artificial sequence
  synthetic peptide
RPENYREALGDVVGDYN

SEQ ID NO: 6929 - protein, 17 aa, Artificial sequence
  synthetic peptide
PENYREALGDVVGDYNF

SEQ ID NO: 6930 - protein, 17 aa, Artificial sequence
  synthetic peptide
ENYREALGDVVGDYNFI

SEQ ID NO: 6931 - protein, 17 aa, Artificial sequence
  synthetic peptide
NYREALGDVVGDYNFIC

SEQ ID NO: 6932 - protein, 17 aa, Artificial sequence
  synthetic peptide
YREALGDVVGDYNFICP

SEQ ID NO: 6933 - protein, 17 aa, Artificial sequence
  synthetic peptide
REALGDVVGDYNFICPA

SEQ ID NO: 6934 - protein, 17 aa, Artificial sequence
  synthetic peptide
EALGDVVGDYNFICPAL

SEQ ID NO: 6935 - protein, 17 aa, Artificial sequence
  synthetic peptide
ALGDVVGDYNFICPALE

SEQ ID NO: 6936 - protein, 17 aa, Artificial sequence
  synthetic peptide
LGDVVGDYNFICPALEF

SEQ ID NO: 6937 - protein, 17 aa, Artificial sequence
  synthetic peptide
GDVVGDYNFICPALEFT

SEQ ID NO: 6938 - protein, 17 aa, Artificial sequence
  synthetic peptide
DVVGDYNFICPALEFTK

SEQ ID NO: 6939 - protein, 17 aa, Artificial sequence
  synthetic peptide
VVGDYNFICPALEFTKK

SEQ ID NO: 6940 - protein, 17 aa, Artificial sequence
  synthetic peptide
VGDYNFICPALEFTKKF

SEQ ID NO: 6941 - protein, 17 aa, Artificial sequence
  synthetic peptide
GDYNFICPALEFTKKFS

SEQ ID NO: 6942 - protein, 17 aa, Artificial sequence
  synthetic peptide
DYNFICPALEFTKKFSE

SEQ ID NO: 6943 - protein, 17 aa, Artificial sequence
  synthetic peptide
YNFICPALEFTKKFSEW

SEQ ID NO: 6944 - protein, 17 aa, Artificial sequence
  synthetic peptide
NFICPALEFTKKFSEWG

SEQ ID NO: 6945 - protein, 17 aa, Artificial sequence
  synthetic peptide
FICPALEFTKKFSEWGN

SEQ ID NO: 6946 - protein, 17 aa, Artificial sequence
  synthetic peptide
ICPALEFTKKFSEWGNN

SEQ ID NO: 6947 - protein, 17 aa, Artificial sequence
  synthetic peptide
CPALEFTKKFSEWGNNA

SEQ ID NO: 6948 - protein, 17 aa, Artificial sequence
  synthetic peptide
PALEFTKKFSEWGNNAF

SEQ ID NO: 6949 - protein, 17 aa, Artificial sequence
  synthetic peptide
ALEFTKKFSEWGNNAFF

SEQ ID NO: 6950 - protein, 17 aa, Artificial sequence
  synthetic peptide
LEFTKKFSEWGNNAFFY

SEQ ID NO: 6951 - protein, 17 aa, Artificial sequence
  synthetic peptide
EFTKKFSEWGNNAFFYY

SEQ ID NO: 6952 - protein, 17 aa, Artificial sequence
  synthetic peptide
FTKKFSEWGNNAFFYYF

SEQ ID NO: 6953 - protein, 17 aa, Artificial sequence
  synthetic peptide
TKKFSEWGNNAFFYYFE

SEQ ID NO: 6954 - protein, 17 aa, Artificial sequence
  synthetic peptide
KKFSEWGNNAFFYYFEH

SEQ ID NO: 6955 - protein, 17 aa, Artificial sequence
  synthetic peptide
KFSEWGNNAFFYYFEHR

SEQ ID NO: 6956 - protein, 17 aa, Artificial sequence
  synthetic peptide
FSEWGNNAFFYYFEHRS

SEQ ID NO: 6957 - protein, 17 aa, Artificial sequence
  synthetic peptide
SEWGNNAFFYYFEHRSS

SEQ ID NO: 6958 - protein, 17 aa, Artificial sequence
  synthetic peptide
EWGNNAFFYYFEHRSSK

SEQ ID NO: 6959 - protein, 17 aa, Artificial sequence
  synthetic peptide
WGNNAFFYYFEHRSSKL

SEQ ID NO: 6960 - protein, 17 aa, Artificial sequence
  synthetic peptide
GNNAFFYYFEHRSSKLP

SEQ ID NO: 6961 - protein, 17 aa, Artificial sequence
  synthetic peptide
NNAFFYYFEHRSSKLPW

SEQ ID NO: 6962 - protein, 17 aa, Artificial sequence
  synthetic peptide
NAFFYYFEHRSSKLPWP

SEQ ID NO: 6963 - protein, 17 aa, Artificial sequence
  synthetic peptide
AFFYYFEHRSSKLPWPE

SEQ ID NO: 6964 - protein, 17 aa, Artificial sequence
  synthetic peptide
FFYYFEHRSSKLPWPEW

SEQ ID NO: 6965 - protein, 17 aa, Artificial sequence
  synthetic peptide
FYYFEHRSSKLPWPEWM

SEQ ID NO: 6966 - protein, 17 aa, Artificial sequence
  synthetic peptide
YYFEHRSSKLPWPEWMG

SEQ ID NO: 6967 - protein, 17 aa, Artificial sequence
  synthetic peptide
YFEHRSSKLPWPEWMGV

SEQ ID NO: 6968 - protein, 17 aa, Artificial sequence
  synthetic peptide
FEHRSSKLPWPEWMGVM

SEQ ID NO: 6969 - protein, 17 aa, Artificial sequence
  synthetic peptide
EHRSSKLPWPEWMGVMH

SEQ ID NO: 6970 - protein, 17 aa, Artificial sequence
  synthetic peptide
HRSSKLPWPEWMGVMHG

SEQ ID NO: 6971 - protein, 17 aa, Artificial sequence
  synthetic peptide
RSSKLPWPEWMGVMHGY

SEQ ID NO: 6972 - protein, 17 aa, Artificial sequence
  synthetic peptide
SSKLPWPEWMGVMHGYE

SEQ ID NO: 6973 - protein, 17 aa, Artificial sequence
  synthetic peptide
SKLPWPEWMGVMHGYEI

SEQ ID NO: 6974 - protein, 17 aa, Artificial sequence
  synthetic peptide
KLPWPEWMGVMHGYEIE

SEQ ID NO: 6975 - protein, 17 aa, Artificial sequence
  synthetic peptide
LPWPEWMGVMHGYEIEF

SEQ ID NO: 6976 - protein, 17 aa, Artificial sequence
  synthetic peptide
PWPEWMGVMHGYEIEFV

SEQ ID NO: 6977 - protein, 17 aa, Artificial sequence
  synthetic peptide
WPEWMGVMHGYEIEFVF

SEQ ID NO: 6978 - protein, 17 aa, Artificial sequence
  synthetic peptide
PEWMGVMHGYEIEFVFG

SEQ ID NO: 6979 - protein, 17 aa, Artificial sequence
  synthetic peptide
EWMGVMHGYEIEFVFGL

SEQ ID NO: 6980 - protein, 17 aa, Artificial sequence
  synthetic peptide
WMGVMHGYEIEFVFGLP

SEQ ID NO: 6981 - protein, 17 aa, Artificial sequence
  synthetic peptide
MGVMHGYEIEFVFGLPL

SEQ ID NO: 6982 - protein, 17 aa, Artificial sequence
  synthetic peptide
GVMHGYEIEFVFGLPLE

SEQ ID NO: 6983 - protein, 17 aa, Artificial sequence
  synthetic peptide
VMHGYEIEFVFGLPLER

SEQ ID NO: 6984 - protein, 17 aa, Artificial sequence
  synthetic peptide
MHGYEIEFVFGLPLERR

SEQ ID NO: 6985 - protein, 17 aa, Artificial sequence
  synthetic peptide
HGYEIEFVFGLPLERRD

SEQ ID NO: 6986 - protein, 17 aa, Artificial sequence
  synthetic peptide
GYEIEFVFGLPLERRDN

SEQ ID NO: 6987 - protein, 17 aa, Artificial sequence
  synthetic peptide
YEIEFVFGLPLERRDNY

SEQ ID NO: 6988 - protein, 17 aa, Artificial sequence
  synthetic peptide
EIEFVFGLPLERRDNYT

SEQ ID NO: 6989 - protein, 17 aa, Artificial sequence
  synthetic peptide
IEFVFGLPLERRDNYTK

SEQ ID NO: 6990 - protein, 17 aa, Artificial sequence
  synthetic peptide
EFVFGLPLERRDNYTKA

SEQ ID NO: 6991 - protein, 17 aa, Artificial sequence
  synthetic peptide
FVFGLPLERRDNYTKAE

SEQ ID NO: 6992 - protein, 17 aa, Artificial sequence
  synthetic peptide
VFGLPLERRDNYTKAEE

SEQ ID NO: 6993 - protein, 17 aa, Artificial sequence
  synthetic peptide
FGLPLERRDNYTKAEEI

SEQ ID NO: 6994 - protein, 17 aa, Artificial sequence
  synthetic peptide
GLPLERRDNYTKAEEIL

SEQ ID NO: 6995 - protein, 17 aa, Artificial sequence
  synthetic peptide
LPLERRDNYTKAEEILS

SEQ ID NO: 6996 - protein, 17 aa, Artificial sequence
  synthetic peptide
PLERRDNYTKAEEILSR

SEQ ID NO: 6997 - protein, 17 aa, Artificial sequence
  synthetic peptide
LERRDNYTKAEEILSRS

SEQ ID NO: 6998 - protein, 17 aa, Artificial sequence
  synthetic peptide
ERRDNYTKAEEILSRSI

SEQ ID NO: 6999 - protein, 17 aa, Artificial sequence
  synthetic peptide
RRDNYTKAEEILSRSIV

SEQ ID NO: 7000 - protein, 17 aa, Artificial sequence
  synthetic peptide
RDNYTKAEEILSRSIVK

SEQ ID NO: 7001 - protein, 17 aa, Artificial sequence
  synthetic peptide
DNYTKAEEILSRSIVKR

SEQ ID NO: 7002 - protein, 17 aa, Artificial sequence
  synthetic peptide
NYTKAEEILSRSIVKRW

SEQ ID NO: 7003 - protein, 17 aa, Artificial sequence
  synthetic peptide
YTKAEEILSRSIVKRWA

SEQ ID NO: 7004 - protein, 17 aa, Artificial sequence
  synthetic peptide
TKAEEILSRSIVKRWAN

SEQ ID NO: 7005 - protein, 17 aa, Artificial sequence
  synthetic peptide
KAEEILSRSIVKRWANF

SEQ ID NO: 7006 - protein, 17 aa, Artificial sequence
  synthetic peptide
AEEILSRSIVKRWANFA

SEQ ID NO: 7007 - protein, 17 aa, Artificial sequence
  synthetic peptide
EEILSRSIVKRWANFAK

SEQ ID NO: 7008 - protein, 17 aa, Artificial sequence
  synthetic peptide
EILSRSIVKRWANFAKY

SEQ ID NO: 7009 - protein, 17 aa, Artificial sequence
  synthetic peptide
ILSRSIVKRWANFAKYG

SEQ ID NO: 7010 - protein, 17 aa, Artificial sequence
  synthetic peptide
LSRSIVKRWANFAKYGN

SEQ ID NO: 7011 - protein, 17 aa, Artificial sequence
  synthetic peptide
SRSIVKRWANFAKYGNP

SEQ ID NO: 7012 - protein, 17 aa, Artificial sequence
  synthetic peptide
RSIVKRWANFAKYGNPN

SEQ ID NO: 7013 - protein, 17 aa, Artificial sequence
  synthetic peptide
SIVKRWANFAKYGNPNE

SEQ ID NO: 7014 - protein, 17 aa, Artificial sequence
  synthetic peptide
IVKRWANFAKYGNPNET

SEQ ID NO: 7015 - protein, 17 aa, Artificial sequence
  synthetic peptide
VKRWANFAKYGNPNETQ

SEQ ID NO: 7016 - protein, 17 aa, Artificial sequence
  synthetic peptide
KRWANFAKYGNPNETQN

SEQ ID NO: 7017 - protein, 17 aa, Artificial sequence
  synthetic peptide
RWANFAKYGNPNETQNN

SEQ ID NO: 7018 - protein, 17 aa, Artificial sequence
  synthetic peptide
WANFAKYGNPNETQNNS

SEQ ID NO: 7019 - protein, 17 aa, Artificial sequence
  synthetic peptide
ANFAKYGNPNETQNNST

SEQ ID NO: 7020 - protein, 17 aa, Artificial sequence
  synthetic peptide
NFAKYGNPNETQNNSTS

SEQ ID NO: 7021 - protein, 17 aa, Artificial sequence
  synthetic peptide
FAKYGNPNETQNNSTSW

SEQ ID NO: 7022 - protein, 17 aa, Artificial sequence
  synthetic peptide
AKYGNPNETQNNSTSWP

SEQ ID NO: 7023 - protein, 17 aa, Artificial sequence
  synthetic peptide
KYGNPNETQNNSTSWPV

SEQ ID NO: 7024 - protein, 17 aa, Artificial sequence
  synthetic peptide
YGNPNETQNNSTSWPVF

SEQ ID NO: 7025 - protein, 17 aa, Artificial sequence
  synthetic peptide
GNPNETQNNSTSWPVFK

SEQ ID NO: 7026 - protein, 17 aa, Artificial sequence
  synthetic peptide
NPNETQNNSTSWPVFKS

SEQ ID NO: 7027 - protein, 17 aa, Artificial sequence
  synthetic peptide
PNETQNNSTSWPVFKST

SEQ ID NO: 7028 - protein, 17 aa, Artificial sequence
  synthetic peptide
NETQNNSTSWPVFKSTE

SEQ ID NO: 7029 - protein, 17 aa, Artificial sequence
  synthetic peptide
ETQNNSTSWPVFKSTEQ

SEQ ID NO: 7030 - protein, 17 aa, Artificial sequence
  synthetic peptide
TQNNSTSWPVFKSTEQK

SEQ ID NO: 7031 - protein, 17 aa, Artificial sequence
  synthetic peptide
QNNSTSWPVFKSTEQKY

SEQ ID NO: 7032 - protein, 17 aa, Artificial sequence
  synthetic peptide
NNSTSWPVFKSTEQKYL

SEQ ID NO: 7033 - protein, 17 aa, Artificial sequence
  synthetic peptide
NSTSWPVFKSTEQKYLT

SEQ ID NO: 7034 - protein, 17 aa, Artificial sequence
  synthetic peptide
STSWPVFKSTEQKYLTL

SEQ ID NO: 7035 - protein, 17 aa, Artificial sequence
  synthetic peptide
TSWPVFKSTEQKYLTLN

SEQ ID NO: 7036 - protein, 17 aa, Artificial sequence
  synthetic peptide
SWPVFKSTEQKYLTLNT

SEQ ID NO: 7037 - protein, 17 aa, Artificial sequence
  synthetic peptide
WPVFKSTEQKYLTLNTE

SEQ ID NO: 7038 - protein, 17 aa, Artificial sequence
  synthetic peptide
PVFKSTEQKYLTLNTES

SEQ ID NO: 7039 - protein, 17 aa, Artificial sequence
  synthetic peptide
VFKSTEQKYLTLNTEST

SEQ ID NO: 7040 - protein, 17 aa, Artificial sequence
  synthetic peptide
FKSTEQKYLTLNTESTR

SEQ ID NO: 7041 - protein, 17 aa, Artificial sequence
  synthetic peptide
KSTEQKYLTLNTESTRI

SEQ ID NO: 7042 - protein, 17 aa, Artificial sequence
  synthetic peptide
STEQKYLTLNTESTRIM

SEQ ID NO: 7043 - protein, 17 aa, Artificial sequence
  synthetic peptide
TEQKYLTLNTESTRIMT

SEQ ID NO: 7044 - protein, 17 aa, Artificial sequence
  synthetic peptide
EQKYLTLNTESTRIMTK

SEQ ID NO: 7045 - protein, 17 aa, Artificial sequence
  synthetic peptide
QKYLTLNTESTRIMTKL

SEQ ID NO: 7046 - protein, 17 aa, Artificial sequence
  synthetic peptide
KYLTLNTESTRIMTKLR

SEQ ID NO: 7047 - protein, 17 aa, Artificial sequence
  synthetic peptide
YLTLNTESTRIMTKLRA

SEQ ID NO: 7048 - protein, 17 aa, Artificial sequence
  synthetic peptide
LTLNTESTRIMTKLRAQ

SEQ ID NO: 7049 - protein, 17 aa, Artificial sequence
  synthetic peptide
TLNTESTRIMTKLRAQQ

SEQ ID NO: 7050 - protein, 17 aa, Artificial sequence
  synthetic peptide
LNTESTRIMTKLRAQQC

SEQ ID NO: 7051 - protein, 17 aa, Artificial sequence
  synthetic peptide
NTESTRIMTKLRAQQCR

SEQ ID NO: 7052 - protein, 17 aa, Artificial sequence
  synthetic peptide
TESTRIMTKLRAQQCRF

SEQ ID NO: 7053 - protein, 17 aa, Artificial sequence
  synthetic peptide
ESTRIMTKLRAQQCRFW

SEQ ID NO: 7054 - protein, 17 aa, Artificial sequence
  synthetic peptide
STRIMTKLRAQQCRFWT

SEQ ID NO: 7055 - protein, 17 aa, Artificial sequence
  synthetic peptide
TRIMTKLRAQQCRFWTS

SEQ ID NO: 7056 - protein, 17 aa, Artificial sequence
  synthetic peptide
RIMTKLRAQQCRFWTSF

SEQ ID NO: 7057 - protein, 17 aa, Artificial sequence
  synthetic peptide
IMTKLRAQQCRFWTSFF

SEQ ID NO: 7058 - protein, 17 aa, Artificial sequence
  synthetic peptide
MTKLRAQQCRFWTSFFP

SEQ ID NO: 7059 - protein, 17 aa, Artificial sequence
  synthetic peptide
TKLRAQQCRFWTSFFPK

SEQ ID NO: 7060 - protein, 17 aa, Artificial sequence
  synthetic peptide
KLRAQQCRFWTSFFPKV

SEQ ID NO: 7061 - protein, 17 aa, Artificial sequence
  synthetic peptide
LRAQQCRFWTSFFPKVL

SEQ ID NO: 7062 - protein, 17 aa, Artificial sequence
  synthetic peptide
RAQQCRFWTSFFPKVLE

SEQ ID NO: 7063 - protein, 17 aa, Artificial sequence
  synthetic peptide
AQQCRFWTSFFPKVLEM

SEQ ID NO: 7064 - protein, 17 aa, Artificial sequence
  synthetic peptide
QQCRFWTSFFPKVLEMT

SEQ ID NO: 7065 - protein, 17 aa, Artificial sequence
  synthetic peptide
QCRFWTSFFPKVLEMTG

SEQ ID NO: 7066 - protein, 17 aa, Artificial sequence
  synthetic peptide
CRFWTSFFPKVLEMTGN

SEQ ID NO: 7067 - protein, 17 aa, Artificial sequence
  synthetic peptide
RFWTSFFPKVLEMTGNI

SEQ ID NO: 7068 - protein, 17 aa, Artificial sequence
  synthetic peptide
FWTSFFPKVLEMTGNID

SEQ ID NO: 7069 - protein, 17 aa, Artificial sequence
  synthetic peptide
WTSFFPKVLEMTGNIDE

SEQ ID NO: 7070 - protein, 17 aa, Artificial sequence
  synthetic peptide
TSFFPKVLEMTGNIDEA

SEQ ID NO: 7071 - protein, 17 aa, Artificial sequence
  synthetic peptide
SFFPKVLEMTGNIDEAE

SEQ ID NO: 7072 - protein, 17 aa, Artificial sequence
  synthetic peptide
FFPKVLEMTGNIDEAEW

SEQ ID NO: 7073 - protein, 17 aa, Artificial sequence
  synthetic peptide
FPKVLEMTGNIDEAEWE

SEQ ID NO: 7074 - protein, 17 aa, Artificial sequence
  synthetic peptide
PKVLEMTGNIDEAEWEW

SEQ ID NO: 7075 - protein, 17 aa, Artificial sequence
  synthetic peptide
KVLEMTGNIDEAEWEWK

SEQ ID NO: 7076 - protein, 17 aa, Artificial sequence
  synthetic peptide
VLEMTGNIDEAEWEWKA

SEQ ID NO: 7077 - protein, 17 aa, Artificial sequence
  synthetic peptide
LEMTGNIDEAEWEWKAG

SEQ ID NO: 7078 - protein, 17 aa, Artificial sequence
  synthetic peptide
EMTGNIDEAEWEWKAGF

SEQ ID NO: 7079 - protein, 17 aa, Artificial sequence
  synthetic peptide
MTGNIDEAEWEWKAGFH

SEQ ID NO: 7080 - protein, 17 aa, Artificial sequence
  synthetic peptide
TGNIDEAEWEWKAGFHR

SEQ ID NO: 7081 - protein, 17 aa, Artificial sequence
  synthetic peptide
GNIDEAEWEWKAGFHRW

SEQ ID NO: 7082 - protein, 17 aa, Artificial sequence
  synthetic peptide
NIDEAEWEWKAGFHRWN

SEQ ID NO: 7083 - protein, 17 aa, Artificial sequence
  synthetic peptide
IDEAEWEWKAGFHRWNN

SEQ ID NO: 7084 - protein, 17 aa, Artificial sequence
  synthetic peptide
DEAEWEWKAGFHRWNNY

SEQ ID NO: 7085 - protein, 17 aa, Artificial sequence
  synthetic peptide
EAEWEWKAGFHRWNNYM

SEQ ID NO: 7086 - protein, 17 aa, Artificial sequence
  synthetic peptide
AEWEWKAGFHRWNNYMM

SEQ ID NO: 7087 - protein, 17 aa, Artificial sequence
  synthetic peptide
EWEWKAGFHRWNNYMMD

SEQ ID NO: 7088 - protein, 17 aa, Artificial sequence
  synthetic peptide
WEWKAGFHRWNNYMMDW

SEQ ID NO: 7089 - protein, 17 aa, Artificial sequence
  synthetic peptide
EWKAGFHRWNNYMMDWK

SEQ ID NO: 7090 - protein, 17 aa, Artificial sequence
  synthetic peptide
WKAGFHRWNNYMMDWKN

SEQ ID NO: 7091 - protein, 17 aa, Artificial sequence
  synthetic peptide
KAGFHRWNNYMMDWKNQ

SEQ ID NO: 7092 - protein, 17 aa, Artificial sequence
  synthetic peptide
AGFHRWNNYMMDWKNQF

SEQ ID NO: 7093 - protein, 17 aa, Artificial sequence
  synthetic peptide
GFHRWNNYMMDWKNQFN

SEQ ID NO: 7094 - protein, 17 aa, Artificial sequence
  synthetic peptide
FHRWNNYMMDWKNQFND

SEQ ID NO: 7095 - protein, 17 aa, Artificial sequence
  synthetic peptide
HRWNNYMMDWKNQFNDY

SEQ ID NO: 7096 - protein, 17 aa, Artificial sequence
  synthetic peptide
RWNNYMMDWKNQFNDYT

SEQ ID NO: 7097 - protein, 17 aa, Artificial sequence
  synthetic peptide
WNNYMMDWKNQFNDYTS

SEQ ID NO: 7098 - protein, 17 aa, Artificial sequence
  synthetic peptide
NNYMMDWKNQFNDYTSK

SEQ ID NO: 7099 - protein, 17 aa, Artificial sequence
  synthetic peptide
NYMMDWKNQFNDYTSKK

SEQ ID NO: 7100 - protein, 17 aa, Artificial sequence
  synthetic peptide
YMMDWKNQFNDYTSKKE

SEQ ID NO: 7101 - protein, 17 aa, Artificial sequence
  synthetic peptide
MMDWKNQFNDYTSKKES

SEQ ID NO: 7102 - protein, 17 aa, Artificial sequence
  synthetic peptide
MDWKNQFNDYTSKKESC

SEQ ID NO: 7103 - protein, 17 aa, Artificial sequence
  synthetic peptide
DWKNQFNDYTSKKESCV

SEQ ID NO: 7104 - protein, 17 aa, Artificial sequence
  synthetic peptide
WKNQFNDYTSKKESCVG

SEQ ID NO: 7105 - protein, 17 aa, Artificial sequence
  synthetic peptide
KNQFNDYTSKKESCVGL

SEQ ID NO: 7106 - protein, 18 aa, Artificial sequence
  synthetic peptide
MHSKVTIICIRFLFWFLL

SEQ ID NO: 7107 - protein, 18 aa, Artificial sequence
  synthetic peptide
HSKVTIICIRFLFWFLLL

SEQ ID NO: 7108 - protein, 18 aa, Artificial sequence
  synthetic peptide
SKVTIICIRFLFWFLLLC

SEQ ID NO: 7109 - protein, 18 aa, Artificial sequence
  synthetic peptide
KVTIICIRFLFWFLLLCM

SEQ ID NO: 7110 - protein, 18 aa, Artificial sequence
  synthetic peptide
VTIICIRFLFWFLLLCML

SEQ ID NO: 7111 - protein, 18 aa, Artificial sequence
  synthetic peptide
TIICIRFLFWFLLLCMLI

SEQ ID NO: 7112 - protein, 18 aa, Artificial sequence
  synthetic peptide
IICIRFLFWFLLLCMLIG

SEQ ID NO: 7113 - protein, 18 aa, Artificial sequence
  synthetic peptide
ICIRFLFWFLLLCMLIGK

SEQ ID NO: 7114 - protein, 18 aa, Artificial sequence
  synthetic peptide
CIRFLFWFLLLCMLIGKS

SEQ ID NO: 7115 - protein, 18 aa, Artificial sequence
  synthetic peptide
IRFLFWFLLLCMLIGKSH

SEQ ID NO: 7116 - protein, 18 aa, Artificial sequence
  synthetic peptide
RFLFWFLLLCMLIGKSHT

SEQ ID NO: 7117 - protein, 18 aa, Artificial sequence
  synthetic peptide
FLFWFLLLCMLIGKSHTE

SEQ ID NO: 7118 - protein, 18 aa, Artificial sequence
  synthetic peptide
LFWFLLLCMLIGKSHTED

SEQ ID NO: 7119 - protein, 18 aa, Artificial sequence
  synthetic peptide
FWFLLLCMLIGKSHTEDD

SEQ ID NO: 7120 - protein, 18 aa, Artificial sequence
  synthetic peptide
WFLLLCMLIGKSHTEDDI

SEQ ID NO: 7121 - protein, 18 aa, Artificial sequence
  synthetic peptide
FLLLCMLIGKSHTEDDII

SEQ ID NO: 7122 - protein, 18 aa, Artificial sequence
  synthetic peptide
LLLCMLIGKSHTEDDIII

SEQ ID NO: 7123 - protein, 18 aa, Artificial sequence
  synthetic peptide
LLCMLIGKSHTEDDIIIA

SEQ ID NO: 7124 - protein, 18 aa, Artificial sequence
  synthetic peptide
LCMLIGKSHTEDDIIIAT

SEQ ID NO: 7125 - protein, 18 aa, Artificial sequence
  synthetic peptide
CMLIGKSHTEDDIIIATK

SEQ ID NO: 7126 - protein, 18 aa, Artificial sequence
  synthetic peptide
MLIGKSHTEDDIIIATKN

SEQ ID NO: 7127 - protein, 18 aa, Artificial sequence
  synthetic peptide
LIGKSHTEDDIIIATKNG

SEQ ID NO: 7128 - protein, 18 aa, Artificial sequence
  synthetic peptide
IGKSHTEDDIIIATKNGK

SEQ ID NO: 7129 - protein, 18 aa, Artificial sequence
  synthetic peptide
GKSHTEDDIIIATKNGKV

SEQ ID NO: 7130 - protein, 18 aa, Artificial sequence
  synthetic peptide
KSHTEDDIIIATKNGKVR

SEQ ID NO: 7131 - protein, 18 aa, Artificial sequence
  synthetic peptide
SHTEDDIIIATKNGKVRG

SEQ ID NO: 7132 - protein, 18 aa, Artificial sequence
  synthetic peptide
HTEDDIIIATKNGKVRGM

SEQ ID NO: 7133 - protein, 18 aa, Artificial sequence
  synthetic peptide
TEDDIIIATKNGKVRGMN

SEQ ID NO: 7134 - protein, 18 aa, Artificial sequence
  synthetic peptide
EDDIIIATKNGKVRGMNL

SEQ ID NO: 7135 - protein, 18 aa, Artificial sequence
  synthetic peptide
DDIIIATKNGKVRGMNLT

SEQ ID NO: 7136 - protein, 18 aa, Artificial sequence
  synthetic peptide
DIIIATKNGKVRGMNLTV

SEQ ID NO: 7137 - protein, 18 aa, Artificial sequence
  synthetic peptide
IIIATKNGKVRGMNLTVF

SEQ ID NO: 7138 - protein, 18 aa, Artificial sequence
  synthetic peptide
IIATKNGKVRGMNLTVFG

SEQ ID NO: 7139 - protein, 18 aa, Artificial sequence
  synthetic peptide
IATKNGKVRGMNLTVFGG

SEQ ID NO: 7140 - protein, 18 aa, Artificial sequence
  synthetic peptide
ATKNGKVRGMNLTVFGGT

SEQ ID NO: 7141 - protein, 18 aa, Artificial sequence
  synthetic peptide
TKNGKVRGMNLTVFGGTV

SEQ ID NO: 7142 - protein, 18 aa, Artificial sequence
  synthetic peptide
KNGKVRGMNLTVFGGTVT

SEQ ID NO: 7143 - protein, 18 aa, Artificial sequence
  synthetic peptide
NGKVRGMNLTVFGGTVTA

SEQ ID NO: 7144 - protein, 18 aa, Artificial sequence
  synthetic peptide
GKVRGMNLTVFGGTVTAF

SEQ ID NO: 7145 - protein, 18 aa, Artificial sequence
  synthetic peptide
KVRGMNLTVFGGTVTAFL

SEQ ID NO: 7146 - protein, 18 aa, Artificial sequence
  synthetic peptide
VRGMNLTVFGGTVTAFLG

SEQ ID NO: 7147 - protein, 18 aa, Artificial sequence
  synthetic peptide
RGMNLTVFGGTVTAFLGI

SEQ ID NO: 7148 - protein, 18 aa, Artificial sequence
  synthetic peptide
GMNLTVFGGTVTAFLGIP

SEQ ID NO: 7149 - protein, 18 aa, Artificial sequence
  synthetic peptide
MNLTVFGGTVTAFLGIPY

SEQ ID NO: 7150 - protein, 18 aa, Artificial sequence
  synthetic peptide
NLTVFGGTVTAFLGIPYA

SEQ ID NO: 7151 - protein, 18 aa, Artificial sequence
  synthetic peptide
LTVFGGTVTAFLGIPYAQ

SEQ ID NO: 7152 - protein, 18 aa, Artificial sequence
  synthetic peptide
TVFGGTVTAFLGIPYAQP

SEQ ID NO: 7153 - protein, 18 aa, Artificial sequence
  synthetic peptide
VFGGTVTAFLGIPYAQPP

SEQ ID NO: 7154 - protein, 18 aa, Artificial sequence
  synthetic peptide
FGGTVTAFLGIPYAQPPL

SEQ ID NO: 7155 - protein, 18 aa, Artificial sequence
  synthetic peptide
GGTVTAFLGIPYAQPPLG

SEQ ID NO: 7156 - protein, 18 aa, Artificial sequence
  synthetic peptide
GTVTAFLGIPYAQPPLGR

SEQ ID NO: 7157 - protein, 18 aa, Artificial sequence
  synthetic peptide
TVTAFLGIPYAQPPLGRL

SEQ ID NO: 7158 - protein, 18 aa, Artificial sequence
  synthetic peptide
VTAFLGIPYAQPPLGRLR

SEQ ID NO: 7159 - protein, 18 aa, Artificial sequence
  synthetic peptide
TAFLGIPYAQPPLGRLRF

SEQ ID NO: 7160 - protein, 18 aa, Artificial sequence
  synthetic peptide
AFLGIPYAQPPLGRLRFK

SEQ ID NO: 7161 - protein, 18 aa, Artificial sequence
  synthetic peptide
FLGIPYAQPPLGRLRFKK

SEQ ID NO: 7162 - protein, 18 aa, Artificial sequence
  synthetic peptide
LGIPYAQPPLGRLRFKKP

SEQ ID NO: 7163 - protein, 18 aa, Artificial sequence
  synthetic peptide
GIPYAQPPLGRLRFKKPQ

SEQ ID NO: 7164 - protein, 18 aa, Artificial sequence
  synthetic peptide
IPYAQPPLGRLRFKKPQS

SEQ ID NO: 7165 - protein, 18 aa, Artificial sequence
  synthetic peptide
PYAQPPLGRLRFKKPQSL

SEQ ID NO: 7166 - protein, 18 aa, Artificial sequence
  synthetic peptide
YAQPPLGRLRFKKPQSLT

SEQ ID NO: 7167 - protein, 18 aa, Artificial sequence
  synthetic peptide
AQPPLGRLRFKKPQSLTK

SEQ ID NO: 7168 - protein, 18 aa, Artificial sequence
  synthetic peptide
QPPLGRLRFKKPQSLTKW

SEQ ID NO: 7169 - protein, 18 aa, Artificial sequence
  synthetic peptide
PPLGRLRFKKPQSLTKWS

SEQ ID NO: 7170 - protein, 18 aa, Artificial sequence
  synthetic peptide
PLGRLRFKKPQSLTKWSD

SEQ ID NO: 7171 - protein, 18 aa, Artificial sequence
  synthetic peptide
LGRLRFKKPQSLTKWSDI

SEQ ID NO: 7172 - protein, 18 aa, Artificial sequence
  synthetic peptide
GRLRFKKPQSLTKWSDIW

SEQ ID NO: 7173 - protein, 18 aa, Artificial sequence
  synthetic peptide
RLRFKKPQSLTKWSDIWN

SEQ ID NO: 7174 - protein, 18 aa, Artificial sequence
  synthetic peptide
LRFKKPQSLTKWSDIWNA

SEQ ID NO: 7175 - protein, 18 aa, Artificial sequence
  synthetic peptide
RFKKPQSLTKWSDIWNAT

SEQ ID NO: 7176 - protein, 18 aa, Artificial sequence
  synthetic peptide
FKKPQSLTKWSDIWNATK

SEQ ID NO: 7177 - protein, 18 aa, Artificial sequence
  synthetic peptide
KKPQSLTKWSDIWNATKY

SEQ ID NO: 7178 - protein, 18 aa, Artificial sequence
  synthetic peptide
KPQSLTKWSDIWNATKYA

SEQ ID NO: 7179 - protein, 18 aa, Artificial sequence
  synthetic peptide
PQSLTKWSDIWNATKYAN

SEQ ID NO: 7180 - protein, 18 aa, Artificial sequence
  synthetic peptide
QSLTKWSDIWNATKYANS

SEQ ID NO: 7181 - protein, 18 aa, Artificial sequence
  synthetic peptide
SLTKWSDIWNATKYANSC

SEQ ID NO: 7182 - protein, 18 aa, Artificial sequence
  synthetic peptide
LTKWSDIWNATKYANSCC

SEQ ID NO: 7183 - protein, 18 aa, Artificial sequence
  synthetic peptide
TKWSDIWNATKYANSCCQ

SEQ ID NO: 7184 - protein, 18 aa, Artificial sequence
  synthetic peptide
KWSDIWNATKYANSCCQN

SEQ ID NO: 7185 - protein, 18 aa, Artificial sequence
  synthetic peptide
WSDIWNATKYANSCCQNI

SEQ ID NO: 7186 - protein, 18 aa, Artificial sequence
  synthetic peptide
SDIWNATKYANSCCQNID

SEQ ID NO: 7187 - protein, 18 aa, Artificial sequence
  synthetic peptide
DIWNATKYANSCCQNIDQ

SEQ ID NO: 7188 - protein, 18 aa, Artificial sequence
  synthetic peptide
IWNATKYANSCCQNIDQS

SEQ ID NO: 7189 - protein, 18 aa, Artificial sequence
  synthetic peptide
WNATKYANSCCQNIDQSF

SEQ ID NO: 7190 - protein, 18 aa, Artificial sequence
  synthetic peptide
NATKYANSCCQNIDQSFP

SEQ ID NO: 7191 - protein, 18 aa, Artificial sequence
  synthetic peptide
ATKYANSCCQNIDQSFPG

SEQ ID NO: 7192 - protein, 18 aa, Artificial sequence
  synthetic peptide
TKYANSCCQNIDQSFPGF

SEQ ID NO: 7193 - protein, 18 aa, Artificial sequence
  synthetic peptide
KYANSCCQNIDQSFPGFH

SEQ ID NO: 7194 - protein, 18 aa, Artificial sequence
  synthetic peptide
YANSCCQNIDQSFPGFHG

SEQ ID NO: 7195 - protein, 18 aa, Artificial sequence
  synthetic peptide
ANSCCQNIDQSFPGFHGS

SEQ ID NO: 7196 - protein, 18 aa, Artificial sequence
  synthetic peptide
NSCCQNIDQSFPGFHGSE

SEQ ID NO: 7197 - protein, 18 aa, Artificial sequence
  synthetic peptide
SCCQNIDQSFPGFHGSEM

SEQ ID NO: 7198 - protein, 18 aa, Artificial sequence
  synthetic peptide
CCQNIDQSFPGFHGSEMW

SEQ ID NO: 7199 - protein, 18 aa, Artificial sequence
  synthetic peptide
CQNIDQSFPGFHGSEMWN

SEQ ID NO: 7200 - protein, 18 aa, Artificial sequence
  synthetic peptide
QNIDQSFPGFHGSEMWNP

SEQ ID NO: 7201 - protein, 18 aa, Artificial sequence
  synthetic peptide
NIDQSFPGFHGSEMWNPN

SEQ ID NO: 7202 - protein, 18 aa, Artificial sequence
  synthetic peptide
IDQSFPGFHGSEMWNPNT

SEQ ID NO: 7203 - protein, 18 aa, Artificial sequence
  synthetic peptide
DQSFPGFHGSEMWNPNTD

SEQ ID NO: 7204 - protein, 18 aa, Artificial sequence
  synthetic peptide
QSFPGFHGSEMWNPNTDL

SEQ ID NO: 7205 - protein, 18 aa, Artificial sequence
  synthetic peptide
SFPGFHGSEMWNPNTDLS

SEQ ID NO: 7206 - protein, 18 aa, Artificial sequence
  synthetic peptide
FPGFHGSEMWNPNTDLSE

SEQ ID NO: 7207 - protein, 18 aa, Artificial sequence
  synthetic peptide
PGFHGSEMWNPNTDLSED

SEQ ID NO: 7208 - protein, 18 aa, Artificial sequence
  synthetic peptide
GFHGSEMWNPNTDLSEDC

SEQ ID NO: 7209 - protein, 18 aa, Artificial sequence
  synthetic peptide
FHGSEMWNPNTDLSEDCL

SEQ ID NO: 7210 - protein, 18 aa, Artificial sequence
  synthetic peptide
HGSEMWNPNTDLSEDCLY

SEQ ID NO: 7211 - protein, 18 aa, Artificial sequence
  synthetic peptide
GSEMWNPNTDLSEDCLYL

SEQ ID NO: 7212 - protein, 18 aa, Artificial sequence
  synthetic peptide
SEMWNPNTDLSEDCLYLN

SEQ ID NO: 7213 - protein, 18 aa, Artificial sequence
  synthetic peptide
EMWNPNTDLSEDCLYLNV

SEQ ID NO: 7214 - protein, 18 aa, Artificial sequence
  synthetic peptide
MWNPNTDLSEDCLYLNVW

SEQ ID NO: 7215 - protein, 18 aa, Artificial sequence
  synthetic peptide
WNPNTDLSEDCLYLNVWI

SEQ ID NO: 7216 - protein, 18 aa, Artificial sequence
  synthetic peptide
NPNTDLSEDCLYLNVWIP

SEQ ID NO: 7217 - protein, 18 aa, Artificial sequence
  synthetic peptide
PNTDLSEDCLYLNVWIPA

SEQ ID NO: 7218 - protein, 18 aa, Artificial sequence
  synthetic peptide
NTDLSEDCLYLNVWIPAP

SEQ ID NO: 7219 - protein, 18 aa, Artificial sequence
  synthetic peptide
TDLSEDCLYLNVWIPAPK

SEQ ID NO: 7220 - protein, 18 aa, Artificial sequence
  synthetic peptide
DLSEDCLYLNVWIPAPKP

SEQ ID NO: 7221 - protein, 18 aa, Artificial sequence
  synthetic peptide
LSEDCLYLNVWIPAPKPK

SEQ ID NO: 7222 - protein, 18 aa, Artificial sequence
  synthetic peptide
SEDCLYLNVWIPAPKPKN

SEQ ID NO: 7223 - protein, 18 aa, Artificial sequence
  synthetic peptide
EDCLYLNVWIPAPKPKNA

SEQ ID NO: 7224 - protein, 18 aa, Artificial sequence
  synthetic peptide
DCLYLNVWIPAPKPKNAT

SEQ ID NO: 7225 - protein, 18 aa, Artificial sequence
  synthetic peptide
CLYLNVWIPAPKPKNATV

SEQ ID NO: 7226 - protein, 18 aa, Artificial sequence
  synthetic peptide
LYLNVWIPAPKPKNATVL

SEQ ID NO: 7227 - protein, 18 aa, Artificial sequence
  synthetic peptide
YLNVWIPAPKPKNATVLI

SEQ ID NO: 7228 - protein, 18 aa, Artificial sequence
  synthetic peptide
LNVWIPAPKPKNATVLIW

SEQ ID NO: 7229 - protein, 18 aa, Artificial sequence
  synthetic peptide
NVWIPAPKPKNATVLIWI

SEQ ID NO: 7230 - protein, 18 aa, Artificial sequence
  synthetic peptide
VWIPAPKPKNATVLIWIY

SEQ ID NO: 7231 - protein, 18 aa, Artificial sequence
  synthetic peptide
WIPAPKPKNATVLIWIYG

SEQ ID NO: 7232 - protein, 18 aa, Artificial sequence
  synthetic peptide
IPAPKPKNATVLIWIYGG

SEQ ID NO: 7233 - protein, 18 aa, Artificial sequence
  synthetic peptide
PAPKPKNATVLIWIYGGG

SEQ ID NO: 7234 - protein, 18 aa, Artificial sequence
  synthetic peptide
APKPKNATVLIWIYGGGF

SEQ ID NO: 7235 - protein, 18 aa, Artificial sequence
  synthetic peptide
PKPKNATVLIWIYGGGFQ

SEQ ID NO: 7236 - protein, 18 aa, Artificial sequence
  synthetic peptide
KPKNATVLIWIYGGGFQT

SEQ ID NO: 7237 - protein, 18 aa, Artificial sequence
  synthetic peptide
PKNATVLIWIYGGGFQTG

SEQ ID NO: 7238 - protein, 18 aa, Artificial sequence
  synthetic peptide
KNATVLIWIYGGGFQTGT

SEQ ID NO: 7239 - protein, 18 aa, Artificial sequence
  synthetic peptide
NATVLIWIYGGGFQTGTS

SEQ ID NO: 7240 - protein, 18 aa, Artificial sequence
  synthetic peptide
ATVLIWIYGGGFQTGTSS

SEQ ID NO: 7241 - protein, 18 aa, Artificial sequence
  synthetic peptide
TVLIWIYGGGFQTGTSSL

SEQ ID NO: 7242 - protein, 18 aa, Artificial sequence
  synthetic peptide
VLIWIYGGGFQTGTSSLH

SEQ ID NO: 7243 - protein, 18 aa, Artificial sequence
  synthetic peptide
LIWIYGGGFQTGTSSLHV

SEQ ID NO: 7244 - protein, 18 aa, Artificial sequence
  synthetic peptide
IWIYGGGFQTGTSSLHVY

SEQ ID NO: 7245 - protein, 18 aa, Artificial sequence
  synthetic peptide
WIYGGGFQTGTSSLHVYD

SEQ ID NO: 7246 - protein, 18 aa, Artificial sequence
  synthetic peptide
IYGGGFQTGTSSLHVYDG

SEQ ID NO: 7247 - protein, 18 aa, Artificial sequence
  synthetic peptide
YGGGFQTGTSSLHVYDGK

SEQ ID NO: 7248 - protein, 18 aa, Artificial sequence
  synthetic peptide
GGGFQTGTSSLHVYDGKF

SEQ ID NO: 7249 - protein, 18 aa, Artificial sequence
  synthetic peptide
GGFQTGTSSLHVYDGKFL

SEQ ID NO: 7250 - protein, 18 aa, Artificial sequence
  synthetic peptide
GFQTGTSSLHVYDGKFLA

SEQ ID NO: 7251 - protein, 18 aa, Artificial sequence
  synthetic peptide
FQTGTSSLHVYDGKFLAR

SEQ ID NO: 7252 - protein, 18 aa, Artificial sequence
  synthetic peptide
QTGTSSLHVYDGKFLARV

SEQ ID NO: 7253 - protein, 18 aa, Artificial sequence
  synthetic peptide
TGTSSLHVYDGKFLARVE

SEQ ID NO: 7254 - protein, 18 aa, Artificial sequence
  synthetic peptide
GTSSLHVYDGKFLARVER

SEQ ID NO: 7255 - protein, 18 aa, Artificial sequence
  synthetic peptide
TSSLHVYDGKFLARVERV

SEQ ID NO: 7256 - protein, 18 aa, Artificial sequence
  synthetic peptide
SSLHVYDGKFLARVERVI

SEQ ID NO: 7257 - protein, 18 aa, Artificial sequence
  synthetic peptide
SLHVYDGKFLARVERVIV

SEQ ID NO: 7258 - protein, 18 aa, Artificial sequence
  synthetic peptide
LHVYDGKFLARVERVIVV

SEQ ID NO: 7259 - protein, 18 aa, Artificial sequence
  synthetic peptide
HVYDGKFLARVERVIVVS

SEQ ID NO: 7260 - protein, 18 aa, Artificial sequence
  synthetic peptide
VYDGKFLARVERVIVVSM

SEQ ID NO: 7261 - protein, 18 aa, Artificial sequence
  synthetic peptide
YDGKFLARVERVIVVSMN

SEQ ID NO: 7262 - protein, 18 aa, Artificial sequence
  synthetic peptide
DGKFLARVERVIVVSMNY

SEQ ID NO: 7263 - protein, 18 aa, Artificial sequence
  synthetic peptide
GKFLARVERVIVVSMNYR

SEQ ID NO: 7264 - protein, 18 aa, Artificial sequence
  synthetic peptide
KFLARVERVIVVSMNYRV

SEQ ID NO: 7265 - protein, 18 aa, Artificial sequence
  synthetic peptide
FLARVERVIVVSMNYRVG

SEQ ID NO: 7266 - protein, 18 aa, Artificial sequence
  synthetic peptide
LARVERVIVVSMNYRVGA

SEQ ID NO: 7267 - protein, 18 aa, Artificial sequence
  synthetic peptide
ARVERVIVVSMNYRVGAL

SEQ ID NO: 7268 - protein, 18 aa, Artificial sequence
  synthetic peptide
RVERVIVVSMNYRVGALG

SEQ ID NO: 7269 - protein, 18 aa, Artificial sequence
  synthetic peptide
VERVIVVSMNYRVGALGF

SEQ ID NO: 7270 - protein, 18 aa, Artificial sequence
  synthetic peptide
ERVIVVSMNYRVGALGFL

SEQ ID NO: 7271 - protein, 18 aa, Artificial sequence
  synthetic peptide
RVIVVSMNYRVGALGFLA

SEQ ID NO: 7272 - protein, 18 aa, Artificial sequence
  synthetic peptide
VIVVSMNYRVGALGFLAL

SEQ ID NO: 7273 - protein, 18 aa, Artificial sequence
  synthetic peptide
IVVSMNYRVGALGFLALP

SEQ ID NO: 7274 - protein, 18 aa, Artificial sequence
  synthetic peptide
VVSMNYRVGALGFLALPG

SEQ ID NO: 7275 - protein, 18 aa, Artificial sequence
  synthetic peptide
VSMNYRVGALGFLALPGN

SEQ ID NO: 7276 - protein, 18 aa, Artificial sequence
  synthetic peptide
SMNYRVGALGFLALPGNP

SEQ ID NO: 7277 - protein, 18 aa, Artificial sequence
  synthetic peptide
MNYRVGALGFLALPGNPE

SEQ ID NO: 7278 - protein, 18 aa, Artificial sequence
  synthetic peptide
NYRVGALGFLALPGNPEA

SEQ ID NO: 7279 - protein, 18 aa, Artificial sequence
  synthetic peptide
YRVGALGFLALPGNPEAP

SEQ ID NO: 7280 - protein, 18 aa, Artificial sequence
  synthetic peptide
RVGALGFLALPGNPEAPG

SEQ ID NO: 7281 - protein, 18 aa, Artificial sequence
  synthetic peptide
VGALGFLALPGNPEAPGN

SEQ ID NO: 7282 - protein, 18 aa, Artificial sequence
  synthetic peptide
GALGFLALPGNPEAPGNM

SEQ ID NO: 7283 - protein, 18 aa, Artificial sequence
  synthetic peptide
ALGFLALPGNPEAPGNMG

SEQ ID NO: 7284 - protein, 18 aa, Artificial sequence
  synthetic peptide
LGFLALPGNPEAPGNMGL

SEQ ID NO: 7285 - protein, 18 aa, Artificial sequence
  synthetic peptide
GFLALPGNPEAPGNMGLF

SEQ ID NO: 7286 - protein, 18 aa, Artificial sequence
  synthetic peptide
FLALPGNPEAPGNMGLFD

SEQ ID NO: 7287 - protein, 18 aa, Artificial sequence
  synthetic peptide
LALPGNPEAPGNMGLFDQ

SEQ ID NO: 7288 - protein, 18 aa, Artificial sequence
  synthetic peptide
ALPGNPEAPGNMGLFDQQ

SEQ ID NO: 7289 - protein, 18 aa, Artificial sequence
  synthetic peptide
LPGNPEAPGNMGLFDQQL

SEQ ID NO: 7290 - protein, 18 aa, Artificial sequence
  synthetic peptide
PGNPEAPGNMGLFDQQLA

SEQ ID NO: 7291 - protein, 18 aa, Artificial sequence
  synthetic peptide
GNPEAPGNMGLFDQQLAL

SEQ ID NO: 7292 - protein, 18 aa, Artificial sequence
  synthetic peptide
NPEAPGNMGLFDQQLALQ

SEQ ID NO: 7293 - protein, 18 aa, Artificial sequence
  synthetic peptide
PEAPGNMGLFDQQLALQW

SEQ ID NO: 7294 - protein, 18 aa, Artificial sequence
  synthetic peptide
EAPGNMGLFDQQLALQWV

SEQ ID NO: 7295 - protein, 18 aa, Artificial sequence
  synthetic peptide
APGNMGLFDQQLALQWVQ

SEQ ID NO: 7296 - protein, 18 aa, Artificial sequence
  synthetic peptide
PGNMGLFDQQLALQWVQK

SEQ ID NO: 7297 - protein, 18 aa, Artificial sequence
  synthetic peptide
GNMGLFDQQLALQWVQKN

SEQ ID NO: 7298 - protein, 18 aa, Artificial sequence
  synthetic peptide
NMGLFDQQLALQWVQKNI

SEQ ID NO: 7299 - protein, 18 aa, Artificial sequence
  synthetic peptide
MGLFDQQLALQWVQKNIA

SEQ ID NO: 7300 - protein, 18 aa, Artificial sequence
  synthetic peptide
GLFDQQLALQWVQKNIAA

SEQ ID NO: 7301 - protein, 18 aa, Artificial sequence
  synthetic peptide
LFDQQLALQWVQKNIAAF

SEQ ID NO: 7302 - protein, 18 aa, Artificial sequence
  synthetic peptide
FDQQLALQWVQKNIAAFG

SEQ ID NO: 7303 - protein, 18 aa, Artificial sequence
  synthetic peptide
DQQLALQWVQKNIAAFGG

SEQ ID NO: 7304 - protein, 18 aa, Artificial sequence
  synthetic peptide
QQLALQWVQKNIAAFGGN

SEQ ID NO: 7305 - protein, 18 aa, Artificial sequence
  synthetic peptide
QLALQWVQKNIAAFGGNP

SEQ ID NO: 7306 - protein, 18 aa, Artificial sequence
  synthetic peptide
LALQWVQKNIAAFGGNPK

SEQ ID NO: 7307 - protein, 18 aa, Artificial sequence
  synthetic peptide
ALQWVQKNIAAFGGNPKS

SEQ ID NO: 7308 - protein, 18 aa, Artificial sequence
  synthetic peptide
LQWVQKNIAAFGGNPKSV

SEQ ID NO: 7309 - protein, 18 aa, Artificial sequence
  synthetic peptide
QWVQKNIAAFGGNPKSVT

SEQ ID NO: 7310 - protein, 18 aa, Artificial sequence
  synthetic peptide
WVQKNIAAFGGNPKSVTL

SEQ ID NO: 7311 - protein, 18 aa, Artificial sequence
  synthetic peptide
VQKNIAAFGGNPKSVTLF

SEQ ID NO: 7312 - protein, 18 aa, Artificial sequence
  synthetic peptide
QKNIAAFGGNPKSVTLFG

SEQ ID NO: 7313 - protein, 18 aa, Artificial sequence
  synthetic peptide
KNIAAFGGNPKSVTLFGE

SEQ ID NO: 7314 - protein, 18 aa, Artificial sequence
  synthetic peptide
NIAAFGGNPKSVTLFGES

SEQ ID NO: 7315 - protein, 18 aa, Artificial sequence
  synthetic peptide
IAAFGGNPKSVTLFGESA

SEQ ID NO: 7316 - protein, 18 aa, Artificial sequence
  synthetic peptide
AAFGGNPKSVTLFGESAG

SEQ ID NO: 7317 - protein, 18 aa, Artificial sequence
  synthetic peptide
AFGGNPKSVTLFGESAGA

SEQ ID NO: 7318 - protein, 18 aa, Artificial sequence
  synthetic peptide
FGGNPKSVTLFGESAGAA

SEQ ID NO: 7319 - protein, 18 aa, Artificial sequence
  synthetic peptide
GGNPKSVTLFGESAGAAS

SEQ ID NO: 7320 - protein, 18 aa, Artificial sequence
  synthetic peptide
GNPKSVTLFGESAGAASV

SEQ ID NO: 7321 - protein, 18 aa, Artificial sequence
  synthetic peptide
NPKSVTLFGESAGAASVS

SEQ ID NO: 7322 - protein, 18 aa, Artificial sequence
  synthetic peptide
PKSVTLFGESAGAASVSL

SEQ ID NO: 7323 - protein, 18 aa, Artificial sequence
  synthetic peptide
KSVTLFGESAGAASVSLH

SEQ ID NO: 7324 - protein, 18 aa, Artificial sequence
  synthetic peptide
SVTLFGESAGAASVSLHL

SEQ ID NO: 7325 - protein, 18 aa, Artificial sequence
  synthetic peptide
VTLFGESAGAASVSLHLL

SEQ ID NO: 7326 - protein, 18 aa, Artificial sequence
  synthetic peptide
TLFGESAGAASVSLHLLS

SEQ ID NO: 7327 - protein, 18 aa, Artificial sequence
  synthetic peptide
LFGESAGAASVSLHLLSP

SEQ ID NO: 7328 - protein, 18 aa, Artificial sequence
  synthetic peptide
FGESAGAASVSLHLLSPG

SEQ ID NO: 7329 - protein, 18 aa, Artificial sequence
  synthetic peptide
GESAGAASVSLHLLSPGS

SEQ ID NO: 7330 - protein, 18 aa, Artificial sequence
  synthetic peptide
ESAGAASVSLHLLSPGSH

SEQ ID NO: 7331 - protein, 18 aa, Artificial sequence
  synthetic peptide
SAGAASVSLHLLSPGSHS

SEQ ID NO: 7332 - protein, 18 aa, Artificial sequence
  synthetic peptide
AGAASVSLHLLSPGSHSL

SEQ ID NO: 7333 - protein, 18 aa, Artificial sequence
  synthetic peptide
GAASVSLHLLSPGSHSLF

SEQ ID NO: 7334 - protein, 18 aa, Artificial sequence
  synthetic peptide
AASVSLHLLSPGSHSLFT

SEQ ID NO: 7335 - protein, 18 aa, Artificial sequence
  synthetic peptide
ASVSLHLLSPGSHSLFTR

SEQ ID NO: 7336 - protein, 18 aa, Artificial sequence
  synthetic peptide
SVSLHLLSPGSHSLFTRA

SEQ ID NO: 7337 - protein, 18 aa, Artificial sequence
  synthetic peptide
VSLHLLSPGSHSLFTRAI

SEQ ID NO: 7338 - protein, 18 aa, Artificial sequence
  synthetic peptide
SLHLLSPGSHSLFTRAIL

SEQ ID NO: 7339 - protein, 18 aa, Artificial sequence
  synthetic peptide
LHLLSPGSHSLFTRAILQ

SEQ ID NO: 7340 - protein, 18 aa, Artificial sequence
  synthetic peptide
HLLSPGSHSLFTRAILQS

SEQ ID NO: 7341 - protein, 18 aa, Artificial sequence
  synthetic peptide
LLSPGSHSLFTRAILQSG

SEQ ID NO: 7342 - protein, 18 aa, Artificial sequence
  synthetic peptide
LSPGSHSLFTRAILQSGS

SEQ ID NO: 7343 - protein, 18 aa, Artificial sequence
  synthetic peptide
SPGSHSLFTRAILQSGSF

SEQ ID NO: 7344 - protein, 18 aa, Artificial sequence
  synthetic peptide
PGSHSLFTRAILQSGSFN

SEQ ID NO: 7345 - protein, 18 aa, Artificial sequence
  synthetic peptide
GSHSLFTRAILQSGSFNA

SEQ ID NO: 7346 - protein, 18 aa, Artificial sequence
  synthetic peptide
SHSLFTRAILQSGSFNAP

SEQ ID NO: 7347 - protein, 18 aa, Artificial sequence
  synthetic peptide
HSLFTRAILQSGSFNAPW

SEQ ID NO: 7348 - protein, 18 aa, Artificial sequence
  synthetic peptide
SLFTRAILQSGSFNAPWA

SEQ ID NO: 7349 - protein, 18 aa, Artificial sequence
  synthetic peptide
LFTRAILQSGSFNAPWAV

SEQ ID NO: 7350 - protein, 18 aa, Artificial sequence
  synthetic peptide
FTRAILQSGSFNAPWAVT

SEQ ID NO: 7351 - protein, 18 aa, Artificial sequence
  synthetic peptide
TRAILQSGSFNAPWAVTS

SEQ ID NO: 7352 - protein, 18 aa, Artificial sequence
  synthetic peptide
RAILQSGSFNAPWAVTSL

SEQ ID NO: 7353 - protein, 18 aa, Artificial sequence
  synthetic peptide
AILQSGSFNAPWAVTSLY

SEQ ID NO: 7354 - protein, 18 aa, Artificial sequence
  synthetic peptide
ILQSGSFNAPWAVTSLYE

SEQ ID NO: 7355 - protein, 18 aa, Artificial sequence
  synthetic peptide
LQSGSFNAPWAVTSLYEA

SEQ ID NO: 7356 - protein, 18 aa, Artificial sequence
  synthetic peptide
QSGSFNAPWAVTSLYEAR

SEQ ID NO: 7357 - protein, 18 aa, Artificial sequence
  synthetic peptide
SGSFNAPWAVTSLYEARN

SEQ ID NO: 7358 - protein, 18 aa, Artificial sequence
  synthetic peptide
GSFNAPWAVTSLYEARNR

SEQ ID NO: 7359 - protein, 18 aa, Artificial sequence
  synthetic peptide
SFNAPWAVTSLYEARNRT

SEQ ID NO: 7360 - protein, 18 aa, Artificial sequence
  synthetic peptide
FNAPWAVTSLYEARNRTL

SEQ ID NO: 7361 - protein, 18 aa, Artificial sequence
  synthetic peptide
NAPWAVTSLYEARNRTLN

SEQ ID NO: 7362 - protein, 18 aa, Artificial sequence
  synthetic peptide
APWAVTSLYEARNRTLNL

SEQ ID NO: 7363 - protein, 18 aa, Artificial sequence
  synthetic peptide
PWAVTSLYEARNRTLNLA

SEQ ID NO: 7364 - protein, 18 aa, Artificial sequence
  synthetic peptide
WAVTSLYEARNRTLNLAK

SEQ ID NO: 7365 - protein, 18 aa, Artificial sequence
  synthetic peptide
AVTSLYEARNRTLNLAKL

SEQ ID NO: 7366 - protein, 18 aa, Artificial sequence
  synthetic peptide
VTSLYEARNRTLNLAKLT

SEQ ID NO: 7367 - protein, 18 aa, Artificial sequence
  synthetic peptide
TSLYEARNRTLNLAKLTG

SEQ ID NO: 7368 - protein, 18 aa, Artificial sequence
  synthetic peptide
SLYEARNRTLNLAKLTGC

SEQ ID NO: 7369 - protein, 18 aa, Artificial sequence
  synthetic peptide
LYEARNRTLNLAKLTGCS

SEQ ID NO: 7370 - protein, 18 aa, Artificial sequence
  synthetic peptide
YEARNRTLNLAKLTGCSR

SEQ ID NO: 7371 - protein, 18 aa, Artificial sequence
  synthetic peptide
EARNRTLNLAKLTGCSRE

SEQ ID NO: 7372 - protein, 18 aa, Artificial sequence
  synthetic peptide
ARNRTLNLAKLTGCSREN

SEQ ID NO: 7373 - protein, 18 aa, Artificial sequence
  synthetic peptide
RNRTLNLAKLTGCSRENE

SEQ ID NO: 7374 - protein, 18 aa, Artificial sequence
  synthetic peptide
NRTLNLAKLTGCSRENET

SEQ ID NO: 7375 - protein, 18 aa, Artificial sequence
  synthetic peptide
RTLNLAKLTGCSRENETE

SEQ ID NO: 7376 - protein, 18 aa, Artificial sequence
  synthetic peptide
TLNLAKLTGCSRENETEI

SEQ ID NO: 7377 - protein, 18 aa, Artificial sequence
  synthetic peptide
LNLAKLTGCSRENETEII

SEQ ID NO: 7378 - protein, 18 aa, Artificial sequence
  synthetic peptide
NLAKLTGCSRENETEIIK

SEQ ID NO: 7379 - protein, 18 aa, Artificial sequence
  synthetic peptide
LAKLTGCSRENETEIIKC

SEQ ID NO: 7380 - protein, 18 aa, Artificial sequence
  synthetic peptide
AKLTGCSRENETEIIKCL

SEQ ID NO: 7381 - protein, 18 aa, Artificial sequence
  synthetic peptide
KLTGCSRENETEIIKCLR

SEQ ID NO: 7382 - protein, 18 aa, Artificial sequence
  synthetic peptide
LTGCSRENETEIIKCLRN

SEQ ID NO: 7383 - protein, 18 aa, Artificial sequence
  synthetic peptide
TGCSRENETEIIKCLRNK

SEQ ID NO: 7384 - protein, 18 aa, Artificial sequence
  synthetic peptide
GCSRENETEIIKCLRNKD

SEQ ID NO: 7385 - protein, 18 aa, Artificial sequence
  synthetic peptide
CSRENETEIIKCLRNKDP

SEQ ID NO: 7386 - protein, 18 aa, Artificial sequence
  synthetic peptide
SRENETEIIKCLRNKDPQ

SEQ ID NO: 7387 - protein, 18 aa, Artificial sequence
  synthetic peptide
RENETEIIKCLRNKDPQE

SEQ ID NO: 7388 - protein, 18 aa, Artificial sequence
  synthetic peptide
ENETEIIKCLRNKDPQEI

SEQ ID NO: 7389 - protein, 18 aa, Artificial sequence
  synthetic peptide
NETEIIKCLRNKDPQEIL

SEQ ID NO: 7390 - protein, 18 aa, Artificial sequence
  synthetic peptide
ETEIIKCLRNKDPQEILL

SEQ ID NO: 7391 - protein, 18 aa, Artificial sequence
  synthetic peptide
TEIIKCLRNKDPQEILLN

SEQ ID NO: 7392 - protein, 18 aa, Artificial sequence
  synthetic peptide
EIIKCLRNKDPQEILLNE

SEQ ID NO: 7393 - protein, 18 aa, Artificial sequence
  synthetic peptide
IIKCLRNKDPQEILLNEA

SEQ ID NO: 7394 - protein, 18 aa, Artificial sequence
  synthetic peptide
IKCLRNKDPQEILLNEAF

SEQ ID NO: 7395 - protein, 18 aa, Artificial sequence
  synthetic peptide
KCLRNKDPQEILLNEAFV

SEQ ID NO: 7396 - protein, 18 aa, Artificial sequence
  synthetic peptide
CLRNKDPQEILLNEAFVV

SEQ ID NO: 7397 - protein, 18 aa, Artificial sequence
  synthetic peptide
LRNKDPQEILLNEAFVVP

SEQ ID NO: 7398 - protein, 18 aa, Artificial sequence
  synthetic peptide
RNKDPQEILLNEAFVVPY

SEQ ID NO: 7399 - protein, 18 aa, Artificial sequence
  synthetic peptide
NKDPQEILLNEAFVVPYG

SEQ ID NO: 7400 - protein, 18 aa, Artificial sequence
  synthetic peptide
KDPQEILLNEAFVVPYGT

SEQ ID NO: 7401 - protein, 18 aa, Artificial sequence
  synthetic peptide
DPQEILLNEAFVVPYGTP

SEQ ID NO: 7402 - protein, 18 aa, Artificial sequence
  synthetic peptide
PQEILLNEAFVVPYGTPL

SEQ ID NO: 7403 - protein, 18 aa, Artificial sequence
  synthetic peptide
QEILLNEAFVVPYGTPLS

SEQ ID NO: 7404 - protein, 18 aa, Artificial sequence
  synthetic peptide
EILLNEAFVVPYGTPLSV

SEQ ID NO: 7405 - protein, 18 aa, Artificial sequence
  synthetic peptide
ILLNEAFVVPYGTPLSVN

SEQ ID NO: 7406 - protein, 18 aa, Artificial sequence
  synthetic peptide
LLNEAFVVPYGTPLSVNF

SEQ ID NO: 7407 - protein, 18 aa, Artificial sequence
  synthetic peptide
LNEAFVVPYGTPLSVNFG

SEQ ID NO: 7408 - protein, 18 aa, Artificial sequence
  synthetic peptide
NEAFVVPYGTPLSVNFGP

SEQ ID NO: 7409 - protein, 18 aa, Artificial sequence
  synthetic peptide
EAFVVPYGTPLSVNFGPT

SEQ ID NO: 7410 - protein, 18 aa, Artificial sequence
  synthetic peptide
AFVVPYGTPLSVNFGPTV

SEQ ID NO: 7411 - protein, 18 aa, Artificial sequence
  synthetic peptide
FVVPYGTPLSVNFGPTVD

SEQ ID NO: 7412 - protein, 18 aa, Artificial sequence
  synthetic peptide
VVPYGTPLSVNFGPTVDG

SEQ ID NO: 7413 - protein, 18 aa, Artificial sequence
  synthetic peptide
VPYGTPLSVNFGPTVDGD

SEQ ID NO: 7414 - protein, 18 aa, Artificial sequence
  synthetic peptide
PYGTPLSVNFGPTVDGDF

SEQ ID NO: 7415 - protein, 18 aa, Artificial sequence
  synthetic peptide
YGTPLSVNFGPTVDGDFL

SEQ ID NO: 7416 - protein, 18 aa, Artificial sequence
  synthetic peptide
GTPLSVNFGPTVDGDFLT

SEQ ID NO: 7417 - protein, 18 aa, Artificial sequence
  synthetic peptide
TPLSVNFGPTVDGDFLTD

SEQ ID NO: 7418 - protein, 18 aa, Artificial sequence
  synthetic peptide
PLSVNFGPTVDGDFLTDM

SEQ ID NO: 7419 - protein, 18 aa, Artificial sequence
  synthetic peptide
LSVNFGPTVDGDFLTDMP

SEQ ID NO: 7420 - protein, 18 aa, Artificial sequence
  synthetic peptide
SVNFGPTVDGDFLTDMPD

SEQ ID NO: 7421 - protein, 18 aa, Artificial sequence
  synthetic peptide
VNFGPTVDGDFLTDMPDI

SEQ ID NO: 7422 - protein, 18 aa, Artificial sequence
  synthetic peptide
NFGPTVDGDFLTDMPDIL

SEQ ID NO: 7423 - protein, 18 aa, Artificial sequence
  synthetic peptide
FGPTVDGDFLTDMPDILL

SEQ ID NO: 7424 - protein, 18 aa, Artificial sequence
  synthetic peptide
GPTVDGDFLTDMPDILLE

SEQ ID NO: 7425 - protein, 18 aa, Artificial sequence
  synthetic peptide
PTVDGDFLTDMPDILLEL

SEQ ID NO: 7426 - protein, 18 aa, Artificial sequence
  synthetic peptide
TVDGDFLTDMPDILLELG

SEQ ID NO: 7427 - protein, 18 aa, Artificial sequence
  synthetic peptide
VDGDFLTDMPDILLELGQ

SEQ ID NO: 7428 - protein, 18 aa, Artificial sequence
  synthetic peptide
DGDFLTDMPDILLELGQF

SEQ ID NO: 7429 - protein, 18 aa, Artificial sequence
  synthetic peptide
GDFLTDMPDILLELGQFK

SEQ ID NO: 7430 - protein, 18 aa, Artificial sequence
  synthetic peptide
DFLTDMPDILLELGQFKK

SEQ ID NO: 7431 - protein, 18 aa, Artificial sequence
  synthetic peptide
FLTDMPDILLELGQFKKT

SEQ ID NO: 7432 - protein, 18 aa, Artificial sequence
  synthetic peptide
LTDMPDILLELGQFKKTQ

SEQ ID NO: 7433 - protein, 18 aa, Artificial sequence
  synthetic peptide
TDMPDILLELGQFKKTQI

SEQ ID NO: 7434 - protein, 18 aa, Artificial sequence
  synthetic peptide
DMPDILLELGQFKKTQIL

SEQ ID NO: 7435 - protein, 18 aa, Artificial sequence
  synthetic peptide
MPDILLELGQFKKTQILV

SEQ ID NO: 7436 - protein, 18 aa, Artificial sequence
  synthetic peptide
PDILLELGQFKKTQILVG

SEQ ID NO: 7437 - protein, 18 aa, Artificial sequence
  synthetic peptide
DILLELGQFKKTQILVGV

SEQ ID NO: 7438 - protein, 18 aa, Artificial sequence
  synthetic peptide
ILLELGQFKKTQILVGVN

SEQ ID NO: 7439 - protein, 18 aa, Artificial sequence
  synthetic peptide
LLELGQFKKTQILVGVNK

SEQ ID NO: 7440 - protein, 18 aa, Artificial sequence
  synthetic peptide
LELGQFKKTQILVGVNKD

SEQ ID NO: 7441 - protein, 18 aa, Artificial sequence
  synthetic peptide
ELGQFKKTQILVGVNKDE

SEQ ID NO: 7442 - protein, 18 aa, Artificial sequence
  synthetic peptide
LGQFKKTQILVGVNKDEG

SEQ ID NO: 7443 - protein, 18 aa, Artificial sequence
  synthetic peptide
GQFKKTQILVGVNKDEGT

SEQ ID NO: 7444 - protein, 18 aa, Artificial sequence
  synthetic peptide
QFKKTQILVGVNKDEGTA

SEQ ID NO: 7445 - protein, 18 aa, Artificial sequence
  synthetic peptide
FKKTQILVGVNKDEGTAF

SEQ ID NO: 7446 - protein, 18 aa, Artificial sequence
  synthetic peptide
KKTQILVGVNKDEGTAFL

SEQ ID NO: 7447 - protein, 18 aa, Artificial sequence
  synthetic peptide
KTQILVGVNKDEGTAFLV

SEQ ID NO: 7448 - protein, 18 aa, Artificial sequence
  synthetic peptide
TQILVGVNKDEGTAFLVY

SEQ ID NO: 7449 - protein, 18 aa, Artificial sequence
  synthetic peptide
QILVGVNKDEGTAFLVYG

SEQ ID NO: 7450 - protein, 18 aa, Artificial sequence
  synthetic peptide
ILVGVNKDEGTAFLVYGA

SEQ ID NO: 7451 - protein, 18 aa, Artificial sequence
  synthetic peptide
LVGVNKDEGTAFLVYGAP

SEQ ID NO: 7452 - protein, 18 aa, Artificial sequence
  synthetic peptide
VGVNKDEGTAFLVYGAPG

SEQ ID NO: 7453 - protein, 18 aa, Artificial sequence
  synthetic peptide
GVNKDEGTAFLVYGAPGF

SEQ ID NO: 7454 - protein, 18 aa, Artificial sequence
  synthetic peptide
VNKDEGTAFLVYGAPGFS

SEQ ID NO: 7455 - protein, 18 aa, Artificial sequence
  synthetic peptide
NKDEGTAFLVYGAPGFSK

SEQ ID NO: 7456 - protein, 18 aa, Artificial sequence
  synthetic peptide
KDEGTAFLVYGAPGFSKD

SEQ ID NO: 7457 - protein, 18 aa, Artificial sequence
  synthetic peptide
DEGTAFLVYGAPGFSKDN

SEQ ID NO: 7458 - protein, 18 aa, Artificial sequence
  synthetic peptide
EGTAFLVYGAPGFSKDNN

SEQ ID NO: 7459 - protein, 18 aa, Artificial sequence
  synthetic peptide
GTAFLVYGAPGFSKDNNS

SEQ ID NO: 7460 - protein, 18 aa, Artificial sequence
  synthetic peptide
TAFLVYGAPGFSKDNNSI

SEQ ID NO: 7461 - protein, 18 aa, Artificial sequence
  synthetic peptide
AFLVYGAPGFSKDNNSII

SEQ ID NO: 7462 - protein, 18 aa, Artificial sequence
  synthetic peptide
FLVYGAPGFSKDNNSIIT

SEQ ID NO: 7463 - protein, 18 aa, Artificial sequence
  synthetic peptide
LVYGAPGFSKDNNSIITR

SEQ ID NO: 7464 - protein, 18 aa, Artificial sequence
  synthetic peptide
VYGAPGFSKDNNSIITRK

SEQ ID NO: 7465 - protein, 18 aa, Artificial sequence
  synthetic peptide
YGAPGFSKDNNSIITRKE

SEQ ID NO: 7466 - protein, 18 aa, Artificial sequence
  synthetic peptide
GAPGFSKDNNSIITRKEF

SEQ ID NO: 7467 - protein, 18 aa, Artificial sequence
  synthetic peptide
APGFSKDNNSIITRKEFQ

SEQ ID NO: 7468 - protein, 18 aa, Artificial sequence
  synthetic peptide
PGFSKDNNSIITRKEFQE

SEQ ID NO: 7469 - protein, 18 aa, Artificial sequence
  synthetic peptide
GFSKDNNSIITRKEFQEG

SEQ ID NO: 7470 - protein, 18 aa, Artificial sequence
  synthetic peptide
FSKDNNSIITRKEFQEGL

SEQ ID NO: 7471 - protein, 18 aa, Artificial sequence
  synthetic peptide
SKDNNSIITRKEFQEGLK

SEQ ID NO: 7472 - protein, 18 aa, Artificial sequence
  synthetic peptide
KDNNSIITRKEFQEGLKI

SEQ ID NO: 7473 - protein, 18 aa, Artificial sequence
  synthetic peptide
DNNSIITRKEFQEGLKIF

SEQ ID NO: 7474 - protein, 18 aa, Artificial sequence
  synthetic peptide
NNSIITRKEFQEGLKIFF

SEQ ID NO: 7475 - protein, 18 aa, Artificial sequence
  synthetic peptide
NSIITRKEFQEGLKIFFP

SEQ ID NO: 7476 - protein, 18 aa, Artificial sequence
  synthetic peptide
SIITRKEFQEGLKIFFPG

SEQ ID NO: 7477 - protein, 18 aa, Artificial sequence
  synthetic peptide
IITRKEFQEGLKIFFPGV

SEQ ID NO: 7478 - protein, 18 aa, Artificial sequence
  synthetic peptide
ITRKEFQEGLKIFFPGVS

SEQ ID NO: 7479 - protein, 18 aa, Artificial sequence
  synthetic peptide
TRKEFQEGLKIFFPGVSE

SEQ ID NO: 7480 - protein, 18 aa, Artificial sequence
  synthetic peptide
RKEFQEGLKIFFPGVSEF

SEQ ID NO: 7481 - protein, 18 aa, Artificial sequence
  synthetic peptide
KEFQEGLKIFFPGVSEFG

SEQ ID NO: 7482 - protein, 18 aa, Artificial sequence
  synthetic peptide
EFQEGLKIFFPGVSEFGK

SEQ ID NO: 7483 - protein, 18 aa, Artificial sequence
  synthetic peptide
FQEGLKIFFPGVSEFGKE

SEQ ID NO: 7484 - protein, 18 aa, Artificial sequence
  synthetic peptide
QEGLKIFFPGVSEFGKES

SEQ ID NO: 7485 - protein, 18 aa, Artificial sequence
  synthetic peptide
EGLKIFFPGVSEFGKESI

SEQ ID NO: 7486 - protein, 18 aa, Artificial sequence
  synthetic peptide
GLKIFFPGVSEFGKESIL

SEQ ID NO: 7487 - protein, 18 aa, Artificial sequence
  synthetic peptide
LKIFFPGVSEFGKESILF

SEQ ID NO: 7488 - protein, 18 aa, Artificial sequence
  synthetic peptide
KIFFPGVSEFGKESILFH

SEQ ID NO: 7489 - protein, 18 aa, Artificial sequence
  synthetic peptide
IFFPGVSEFGKESILFHY

SEQ ID NO: 7490 - protein, 18 aa, Artificial sequence
  synthetic peptide
FFPGVSEFGKESILFHYT

SEQ ID NO: 7491 - protein, 18 aa, Artificial sequence
  synthetic peptide
FPGVSEFGKESILFHYTD

SEQ ID NO: 7492 - protein, 18 aa, Artificial sequence
  synthetic peptide
PGVSEFGKESILFHYTDW

SEQ ID NO: 7493 - protein, 18 aa, Artificial sequence
  synthetic peptide
GVSEFGKESILFHYTDWV

SEQ ID NO: 7494 - protein, 18 aa, Artificial sequence
  synthetic peptide
VSEFGKESILFHYTDWVD

SEQ ID NO: 7495 - protein, 18 aa, Artificial sequence
  synthetic peptide
SEFGKESILFHYTDWVDD

SEQ ID NO: 7496 - protein, 18 aa, Artificial sequence
  synthetic peptide
EFGKESILFHYTDWVDDQ

SEQ ID NO: 7497 - protein, 18 aa, Artificial sequence
  synthetic peptide
FGKESILFHYTDWVDDQR

SEQ ID NO: 7498 - protein, 18 aa, Artificial sequence
  synthetic peptide
GKESILFHYTDWVDDQRP

SEQ ID NO: 7499 - protein, 18 aa, Artificial sequence
  synthetic peptide
KESILFHYTDWVDDQRPE

SEQ ID NO: 7500 - protein, 18 aa, Artificial sequence
  synthetic peptide
ESILFHYTDWVDDQRPEN

SEQ ID NO: 7501 - protein, 18 aa, Artificial sequence
  synthetic peptide
SILFHYTDWVDDQRPENY

SEQ ID NO: 7502 - protein, 18 aa, Artificial sequence
  synthetic peptide
ILFHYTDWVDDQRPENYR

SEQ ID NO: 7503 - protein, 18 aa, Artificial sequence
  synthetic peptide
LFHYTDWVDDQRPENYRE

SEQ ID NO: 7504 - protein, 18 aa, Artificial sequence
  synthetic peptide
FHYTDWVDDQRPENYREA

SEQ ID NO: 7505 - protein, 18 aa, Artificial sequence
  synthetic peptide
HYTDWVDDQRPENYREAL

SEQ ID NO: 7506 - protein, 18 aa, Artificial sequence
  synthetic peptide
YTDWVDDQRPENYREALG

SEQ ID NO: 7507 - protein, 18 aa, Artificial sequence
  synthetic peptide
TDWVDDQRPENYREALGD

SEQ ID NO: 7508 - protein, 18 aa, Artificial sequence
  synthetic peptide
DWVDDQRPENYREALGDV

SEQ ID NO: 7509 - protein, 18 aa, Artificial sequence
  synthetic peptide
WVDDQRPENYREALGDVV

SEQ ID NO: 7510 - protein, 18 aa, Artificial sequence
  synthetic peptide
VDDQRPENYREALGDVVG

SEQ ID NO: 7511 - protein, 18 aa, Artificial sequence
  synthetic peptide
DDQRPENYREALGDVVGD

SEQ ID NO: 7512 - protein, 18 aa, Artificial sequence
  synthetic peptide
DQRPENYREALGDVVGDY

SEQ ID NO: 7513 - protein, 18 aa, Artificial sequence
  synthetic peptide
QRPENYREALGDVVGDYN

SEQ ID NO: 7514 - protein, 18 aa, Artificial sequence
  synthetic peptide
RPENYREALGDVVGDYNF

SEQ ID NO: 7515 - protein, 18 aa, Artificial sequence
  synthetic peptide
PENYREALGDVVGDYNFI

SEQ ID NO: 7516 - protein, 18 aa, Artificial sequence
  synthetic peptide
ENYREALGDVVGDYNFIC

SEQ ID NO: 7517 - protein, 18 aa, Artificial sequence
  synthetic peptide
NYREALGDVVGDYNFICP

SEQ ID NO: 7518 - protein, 18 aa, Artificial sequence
  synthetic peptide
YREALGDVVGDYNFICPA

SEQ ID NO: 7519 - protein, 18 aa, Artificial sequence
  synthetic peptide
REALGDVVGDYNFICPAL

SEQ ID NO: 7520 - protein, 18 aa, Artificial sequence
  synthetic peptide
EALGDVVGDYNFICPALE

SEQ ID NO: 7521 - protein, 18 aa, Artificial sequence
  synthetic peptide
ALGDVVGDYNFICPALEF

SEQ ID NO: 7522 - protein, 18 aa, Artificial sequence
  synthetic peptide
LGDVVGDYNFICPALEFT

SEQ ID NO: 7523 - protein, 18 aa, Artificial sequence
  synthetic peptide
GDVVGDYNFICPALEFTK

SEQ ID NO: 7524 - protein, 18 aa, Artificial sequence
  synthetic peptide
DVVGDYNFICPALEFTKK

SEQ ID NO: 7525 - protein, 18 aa, Artificial sequence
  synthetic peptide
VVGDYNFICPALEFTKKF

SEQ ID NO: 7526 - protein, 18 aa, Artificial sequence
  synthetic peptide
VGDYNFICPALEFTKKFS

SEQ ID NO: 7527 - protein, 18 aa, Artificial sequence
  synthetic peptide
GDYNFICPALEFTKKFSE

SEQ ID NO: 7528 - protein, 18 aa, Artificial sequence
  synthetic peptide
DYNFICPALEFTKKFSEW

SEQ ID NO: 7529 - protein, 18 aa, Artificial sequence
  synthetic peptide
YNFICPALEFTKKFSEWG

SEQ ID NO: 7530 - protein, 18 aa, Artificial sequence
  synthetic peptide
NFICPALEFTKKFSEWGN

SEQ ID NO: 7531 - protein, 18 aa, Artificial sequence
  synthetic peptide
FICPALEFTKKFSEWGNN

SEQ ID NO: 7532 - protein, 18 aa, Artificial sequence
  synthetic peptide
ICPALEFTKKFSEWGNNA

SEQ ID NO: 7533 - protein, 18 aa, Artificial sequence
  synthetic peptide
CPALEFTKKFSEWGNNAF

SEQ ID NO: 7534 - protein, 18 aa, Artificial sequence
  synthetic peptide
PALEFTKKFSEWGNNAFF

SEQ ID NO: 7535 - protein, 18 aa, Artificial sequence
  synthetic peptide
ALEFTKKFSEWGNNAFFY

SEQ ID NO: 7536 - protein, 18 aa, Artificial sequence
  synthetic peptide
LEFTKKFSEWGNNAFFYY

SEQ ID NO: 7537 - protein, 18 aa, Artificial sequence
  synthetic peptide
EFTKKFSEWGNNAFFYYF

SEQ ID NO: 7538 - protein, 18 aa, Artificial sequence
  synthetic peptide
FTKKFSEWGNNAFFYYFE

SEQ ID NO: 7539 - protein, 18 aa, Artificial sequence
  synthetic peptide
TKKFSEWGNNAFFYYFEH

SEQ ID NO: 7540 - protein, 18 aa, Artificial sequence
  synthetic peptide
KKFSEWGNNAFFYYFEHR

SEQ ID NO: 7541 - protein, 18 aa, Artificial sequence
  synthetic peptide
KFSEWGNNAFFYYFEHRS

SEQ ID NO: 7542 - protein, 18 aa, Artificial sequence
  synthetic peptide
FSEWGNNAFFYYFEHRSS

SEQ ID NO: 7543 - protein, 18 aa, Artificial sequence
  synthetic peptide
SEWGNNAFFYYFEHRSSK

SEQ ID NO: 7544 - protein, 18 aa, Artificial sequence
  synthetic peptide
EWGNNAFFYYFEHRSSKL

SEQ ID NO: 7545 - protein, 18 aa, Artificial sequence
  synthetic peptide
WGNNAFFYYFEHRSSKLP

SEQ ID NO: 7546 - protein, 18 aa, Artificial sequence
  synthetic peptide
GNNAFFYYFEHRSSKLPW

SEQ ID NO: 7547 - protein, 18 aa, Artificial sequence
  synthetic peptide
NNAFFYYFEHRSSKLPWP

SEQ ID NO: 7548 - protein, 18 aa, Artificial sequence
  synthetic peptide
NAFFYYFEHRSSKLPWPE

SEQ ID NO: 7549 - protein, 18 aa, Artificial sequence
  synthetic peptide
AFFYYFEHRSSKLPWPEW

SEQ ID NO: 7550 - protein, 18 aa, Artificial sequence
  synthetic peptide
FFYYFEHRSSKLPWPEWM

SEQ ID NO: 7551 - protein, 18 aa, Artificial sequence
  synthetic peptide
FYYFEHRSSKLPWPEWMG

SEQ ID NO: 7552 - protein, 18 aa, Artificial sequence
  synthetic peptide
YYFEHRSSKLPWPEWMGV

SEQ ID NO: 7553 - protein, 18 aa, Artificial sequence
  synthetic peptide
YFEHRSSKLPWPEWMGVM

SEQ ID NO: 7554 - protein, 18 aa, Artificial sequence
  synthetic peptide
FEHRSSKLPWPEWMGVMH

SEQ ID NO: 7555 - protein, 18 aa, Artificial sequence
  synthetic peptide
EHRSSKLPWPEWMGVMHG

SEQ ID NO: 7556 - protein, 18 aa, Artificial sequence
  synthetic peptide
HRSSKLPWPEWMGVMHGY

SEQ ID NO: 7557 - protein, 18 aa, Artificial sequence
  synthetic peptide
RSSKLPWPEWMGVMHGYE

SEQ ID NO: 7558 - protein, 18 aa, Artificial sequence
  synthetic peptide
SSKLPWPEWMGVMHGYEI

SEQ ID NO: 7559 - protein, 18 aa, Artificial sequence
  synthetic peptide
SKLPWPEWMGVMHGYEIE

SEQ ID NO: 7560 - protein, 18 aa, Artificial sequence
  synthetic peptide
KLPWPEWMGVMHGYEIEF

SEQ ID NO: 7561 - protein, 18 aa, Artificial sequence
  synthetic peptide
LPWPEWMGVMHGYEIEFV

SEQ ID NO: 7562 - protein, 18 aa, Artificial sequence
  synthetic peptide
PWPEWMGVMHGYEIEFVF

SEQ ID NO: 7563 - protein, 18 aa, Artificial sequence
  synthetic peptide
WPEWMGVMHGYEIEFVFG

SEQ ID NO: 7564 - protein, 18 aa, Artificial sequence
  synthetic peptide
PEWMGVMHGYEIEFVFGL

SEQ ID NO: 7565 - protein, 18 aa, Artificial sequence
  synthetic peptide
EWMGVMHGYEIEFVFGLP

SEQ ID NO: 7566 - protein, 18 aa, Artificial sequence
  synthetic peptide
WMGVMHGYEIEFVFGLPL

SEQ ID NO: 7567 - protein, 18 aa, Artificial sequence
  synthetic peptide
MGVMHGYEIEFVFGLPLE

SEQ ID NO: 7568 - protein, 18 aa, Artificial sequence
  synthetic peptide
GVMHGYEIEFVFGLPLER

SEQ ID NO: 7569 - protein, 18 aa, Artificial sequence
  synthetic peptide
VMHGYEIEFVFGLPLERR

SEQ ID NO: 7570 - protein, 18 aa, Artificial sequence
  synthetic peptide
MHGYEIEFVFGLPLERRD

SEQ ID NO: 7571 - protein, 18 aa, Artificial sequence
  synthetic peptide
HGYEIEFVFGLPLERRDN

SEQ ID NO: 7572 - protein, 18 aa, Artificial sequence
  synthetic peptide
GYEIEFVFGLPLERRDNY

SEQ ID NO: 7573 - protein, 18 aa, Artificial sequence
  synthetic peptide
YEIEFVFGLPLERRDNYT

SEQ ID NO: 7574 - protein, 18 aa, Artificial sequence
  synthetic peptide
EIEFVFGLPLERRDNYTK

SEQ ID NO: 7575 - protein, 18 aa, Artificial sequence
  synthetic peptide
IEFVFGLPLERRDNYTKA

SEQ ID NO: 7576 - protein, 18 aa, Artificial sequence
  synthetic peptide
EFVFGLPLERRDNYTKAE

SEQ ID NO: 7577 - protein, 18 aa, Artificial sequence
  synthetic peptide
FVFGLPLERRDNYTKAEE

SEQ ID NO: 7578 - protein, 18 aa, Artificial sequence
  synthetic peptide
VFGLPLERRDNYTKAEEI

SEQ ID NO: 7579 - protein, 18 aa, Artificial sequence
  synthetic peptide
FGLPLERRDNYTKAEEIL

SEQ ID NO: 7580 - protein, 18 aa, Artificial sequence
  synthetic peptide
GLPLERRDNYTKAEEILS

SEQ ID NO: 7581 - protein, 18 aa, Artificial sequence
  synthetic peptide
LPLERRDNYTKAEEILSR

SEQ ID NO: 7582 - protein, 18 aa, Artificial sequence
  synthetic peptide
PLERRDNYTKAEEILSRS

SEQ ID NO: 7583 - protein, 18 aa, Artificial sequence
  synthetic peptide
LERRDNYTKAEEILSRSI

SEQ ID NO: 7584 - protein, 18 aa, Artificial sequence
  synthetic peptide
ERRDNYTKAEEILSRSIV

SEQ ID NO: 7585 - protein, 18 aa, Artificial sequence
  synthetic peptide
RRDNYTKAEEILSRSIVK

SEQ ID NO: 7586 - protein, 18 aa, Artificial sequence
  synthetic peptide
RDNYTKAEEILSRSIVKR

SEQ ID NO: 7587 - protein, 18 aa, Artificial sequence
  synthetic peptide
DNYTKAEEILSRSIVKRW

SEQ ID NO: 7588 - protein, 18 aa, Artificial sequence
  synthetic peptide
NYTKAEEILSRSIVKRWA

SEQ ID NO: 7589 - protein, 18 aa, Artificial sequence
  synthetic peptide
YTKAEEILSRSIVKRWAN

SEQ ID NO: 7590 - protein, 18 aa, Artificial sequence
  synthetic peptide
TKAEEILSRSIVKRWANF

SEQ ID NO: 7591 - protein, 18 aa, Artificial sequence
  synthetic peptide
KAEEILSRSIVKRWANFA

SEQ ID NO: 7592 - protein, 18 aa, Artificial sequence
  synthetic peptide
AEEILSRSIVKRWANFAK

SEQ ID NO: 7593 - protein, 18 aa, Artificial sequence
  synthetic peptide
EEILSRSIVKRWANFAKY

SEQ ID NO: 7594 - protein, 18 aa, Artificial sequence
  synthetic peptide
EILSRSIVKRWANFAKYG

SEQ ID NO: 7595 - protein, 18 aa, Artificial sequence
  synthetic peptide
ILSRSIVKRWANFAKYGN

SEQ ID NO: 7596 - protein, 18 aa, Artificial sequence
  synthetic peptide
LSRSIVKRWANFAKYGNP

SEQ ID NO: 7597 - protein, 18 aa, Artificial sequence
  synthetic peptide
SRSIVKRWANFAKYGNPN

SEQ ID NO: 7598 - protein, 18 aa, Artificial sequence
  synthetic peptide
RSIVKRWANFAKYGNPNE

SEQ ID NO: 7599 - protein, 18 aa, Artificial sequence
  synthetic peptide
SIVKRWANFAKYGNPNET

SEQ ID NO: 7600 - protein, 18 aa, Artificial sequence
  synthetic peptide
IVKRWANFAKYGNPNETQ

SEQ ID NO: 7601 - protein, 18 aa, Artificial sequence
  synthetic peptide
VKRWANFAKYGNPNETQN

SEQ ID NO: 7602 - protein, 18 aa, Artificial sequence
  synthetic peptide
KRWANFAKYGNPNETQNN

SEQ ID NO: 7603 - protein, 18 aa, Artificial sequence
  synthetic peptide
RWANFAKYGNPNETQNNS

SEQ ID NO: 7604 - protein, 18 aa, Artificial sequence
  synthetic peptide
WANFAKYGNPNETQNNST

SEQ ID NO: 7605 - protein, 18 aa, Artificial sequence
  synthetic peptide
ANFAKYGNPNETQNNSTS

SEQ ID NO: 7606 - protein, 18 aa, Artificial sequence
  synthetic peptide
NFAKYGNPNETQNNSTSW

SEQ ID NO: 7607 - protein, 18 aa, Artificial sequence
  synthetic peptide
FAKYGNPNETQNNSTSWP

SEQ ID NO: 7608 - protein, 18 aa, Artificial sequence
  synthetic peptide
AKYGNPNETQNNSTSWPV

SEQ ID NO: 7609 - protein, 18 aa, Artificial sequence
  synthetic peptide
KYGNPNETQNNSTSWPVF

SEQ ID NO: 7610 - protein, 18 aa, Artificial sequence
  synthetic peptide
YGNPNETQNNSTSWPVFK

SEQ ID NO: 7611 - protein, 18 aa, Artificial sequence
  synthetic peptide
GNPNETQNNSTSWPVFKS

SEQ ID NO: 7612 - protein, 18 aa, Artificial sequence
  synthetic peptide
NPNETQNNSTSWPVFKST

SEQ ID NO: 7613 - protein, 18 aa, Artificial sequence
  synthetic peptide
PNETQNNSTSWPVFKSTE

SEQ ID NO: 7614 - protein, 18 aa, Artificial sequence
  synthetic peptide
NETQNNSTSWPVFKSTEQ

SEQ ID NO: 7615 - protein, 18 aa, Artificial sequence
  synthetic peptide
ETQNNSTSWPVFKSTEQK

SEQ ID NO: 7616 - protein, 18 aa, Artificial sequence
  synthetic peptide
TQNNSTSWPVFKSTEQKY

SEQ ID NO: 7617 - protein, 18 aa, Artificial sequence
  synthetic peptide
QNNSTSWPVFKSTEQKYL

SEQ ID NO: 7618 - protein, 18 aa, Artificial sequence
  synthetic peptide
NNSTSWPVFKSTEQKYLT

SEQ ID NO: 7619 - protein, 18 aa, Artificial sequence
  synthetic peptide
NSTSWPVFKSTEQKYLTL

SEQ ID NO: 7620 - protein, 18 aa, Artificial sequence
  synthetic peptide
STSWPVFKSTEQKYLTLN

SEQ ID NO: 7621 - protein, 18 aa, Artificial sequence
  synthetic peptide
TSWPVFKSTEQKYLTLNT

SEQ ID NO: 7622 - protein, 18 aa, Artificial sequence
  synthetic peptide
SWPVFKSTEQKYLTLNTE

SEQ ID NO: 7623 - protein, 18 aa, Artificial sequence
  synthetic peptide
WPVFKSTEQKYLTLNTES

SEQ ID NO: 7624 - protein, 18 aa, Artificial sequence
  synthetic peptide
PVFKSTEQKYLTLNTEST

SEQ ID NO: 7625 - protein, 18 aa, Artificial sequence
  synthetic peptide
VFKSTEQKYLTLNTESTR

SEQ ID NO: 7626 - protein, 18 aa, Artificial sequence
  synthetic peptide
FKSTEQKYLTLNTESTRI

SEQ ID NO: 7627 - protein, 18 aa, Artificial sequence
  synthetic peptide
KSTEQKYLTLNTESTRIM

SEQ ID NO: 7628 - protein, 18 aa, Artificial sequence
  synthetic peptide
STEQKYLTLNTESTRIMT

SEQ ID NO: 7629 - protein, 18 aa, Artificial sequence
  synthetic peptide
TEQKYLTLNTESTRIMTK

SEQ ID NO: 7630 - protein, 18 aa, Artificial sequence
  synthetic peptide
EQKYLTLNTESTRIMTKL

SEQ ID NO: 7631 - protein, 18 aa, Artificial sequence
  synthetic peptide
QKYLTLNTESTRIMTKLR

SEQ ID NO: 7632 - protein, 18 aa, Artificial sequence
  synthetic peptide
KYLTLNTESTRIMTKLRA

SEQ ID NO: 7633 - protein, 18 aa, Artificial sequence
  synthetic peptide
YLTLNTESTRIMTKLRAQ

SEQ ID NO: 7634 - protein, 18 aa, Artificial sequence
  synthetic peptide
LTLNTESTRIMTKLRAQQ

SEQ ID NO: 7635 - protein, 18 aa, Artificial sequence
  synthetic peptide
TLNTESTRIMTKLRAQQC

SEQ ID NO: 7636 - protein, 18 aa, Artificial sequence
  synthetic peptide
LNTESTRIMTKLRAQQCR

SEQ ID NO: 7637 - protein, 18 aa, Artificial sequence
  synthetic peptide
NTESTRIMTKLRAQQCRF

SEQ ID NO: 7638 - protein, 18 aa, Artificial sequence
  synthetic peptide
TESTRIMTKLRAQQCRFW

SEQ ID NO: 7639 - protein, 18 aa, Artificial sequence
  synthetic peptide
ESTRIMTKLRAQQCRFWT

SEQ ID NO: 7640 - protein, 18 aa, Artificial sequence
  synthetic peptide
STRIMTKLRAQQCRFWTS

SEQ ID NO: 7641 - protein, 18 aa, Artificial sequence
  synthetic peptide
TRIMTKLRAQQCRFWTSF

SEQ ID NO: 7642 - protein, 18 aa, Artificial sequence
  synthetic peptide
RIMTKLRAQQCRFWTSFF

SEQ ID NO: 7643 - protein, 18 aa, Artificial sequence
  synthetic peptide
IMTKLRAQQCRFWTSFFP

SEQ ID NO: 7644 - protein, 18 aa, Artificial sequence
  synthetic peptide
MTKLRAQQCRFWTSFFPK

SEQ ID NO: 7645 - protein, 18 aa, Artificial sequence
  synthetic peptide
TKLRAQQCRFWTSFFPKV

SEQ ID NO: 7646 - protein, 18 aa, Artificial sequence
  synthetic peptide
KLRAQQCRFWTSFFPKVL

SEQ ID NO: 7647 - protein, 18 aa, Artificial sequence
  synthetic peptide
LRAQQCRFWTSFFPKVLE

SEQ ID NO: 7648 - protein, 18 aa, Artificial sequence
  synthetic peptide
RAQQCRFWTSFFPKVLEM

SEQ ID NO: 7649 - protein, 18 aa, Artificial sequence
  synthetic peptide
AQQCRFWTSFFPKVLEMT

SEQ ID NO: 7650 - protein, 18 aa, Artificial sequence
  synthetic peptide
QQCRFWTSFFPKVLEMTG

SEQ ID NO: 7651 - protein, 18 aa, Artificial sequence
  synthetic peptide
QCRFWTSFFPKVLEMTGN

SEQ ID NO: 7652 - protein, 18 aa, Artificial sequence
  synthetic peptide
CRFWTSFFPKVLEMTGNI

SEQ ID NO: 7653 - protein, 18 aa, Artificial sequence
  synthetic peptide
RFWTSFFPKVLEMTGNID

SEQ ID NO: 7654 - protein, 18 aa, Artificial sequence
  synthetic peptide
FWTSFFPKVLEMTGNIDE

SEQ ID NO: 7655 - protein, 18 aa, Artificial sequence
  synthetic peptide
WTSFFPKVLEMTGNIDEA

SEQ ID NO: 7656 - protein, 18 aa, Artificial sequence
  synthetic peptide
TSFFPKVLEMTGNIDEAE

SEQ ID NO: 7657 - protein, 18 aa, Artificial sequence
  synthetic peptide
SFFPKVLEMTGNIDEAEW

SEQ ID NO: 7658 - protein, 18 aa, Artificial sequence
  synthetic peptide
FFPKVLEMTGNIDEAEWE

SEQ ID NO: 7659 - protein, 18 aa, Artificial sequence
  synthetic peptide
FPKVLEMTGNIDEAEWEW

SEQ ID NO: 7660 - protein, 18 aa, Artificial sequence
  synthetic peptide
PKVLEMTGNIDEAEWEWK

SEQ ID NO: 7661 - protein, 18 aa, Artificial sequence
  synthetic peptide
KVLEMTGNIDEAEWEWKA

SEQ ID NO: 7662 - protein, 18 aa, Artificial sequence
  synthetic peptide
VLEMTGNIDEAEWEWKAG

SEQ ID NO: 7663 - protein, 18 aa, Artificial sequence
  synthetic peptide
LEMTGNIDEAEWEWKAGF

SEQ ID NO: 7664 - protein, 18 aa, Artificial sequence
  synthetic peptide
EMTGNIDEAEWEWKAGFH

SEQ ID NO: 7665 - protein, 18 aa, Artificial sequence
  synthetic peptide
MTGNIDEAEWEWKAGFHR

SEQ ID NO: 7666 - protein, 18 aa, Artificial sequence
  synthetic peptide
TGNIDEAEWEWKAGFHRW

SEQ ID NO: 7667 - protein, 18 aa, Artificial sequence
  synthetic peptide
GNIDEAEWEWKAGFHRWN

SEQ ID NO: 7668 - protein, 18 aa, Artificial sequence
  synthetic peptide
NIDEAEWEWKAGFHRWNN

SEQ ID NO: 7669 - protein, 18 aa, Artificial sequence
  synthetic peptide
IDEAEWEWKAGFHRWNNY

SEQ ID NO: 7670 - protein, 18 aa, Artificial sequence
  synthetic peptide
DEAEWEWKAGFHRWNNYM

SEQ ID NO: 7671 - protein, 18 aa, Artificial sequence
  synthetic peptide
EAEWEWKAGFHRWNNYMM

SEQ ID NO: 7672 - protein, 18 aa, Artificial sequence
  synthetic peptide
AEWEWKAGFHRWNNYMMD

SEQ ID NO: 7673 - protein, 18 aa, Artificial sequence
  synthetic peptide
EWEWKAGFHRWNNYMMDW

SEQ ID NO: 7674 - protein, 18 aa, Artificial sequence
  synthetic peptide
WEWKAGFHRWNNYMMDWK

SEQ ID NO: 7675 - protein, 18 aa, Artificial sequence
  synthetic peptide
EWKAGFHRWNNYMMDWKN

SEQ ID NO: 7676 - protein, 18 aa, Artificial sequence
  synthetic peptide
WKAGFHRWNNYMMDWKNQ

SEQ ID NO: 7677 - protein, 18 aa, Artificial sequence
  synthetic peptide
KAGFHRWNNYMMDWKNQF

SEQ ID NO: 7678 - protein, 18 aa, Artificial sequence
  synthetic peptide
AGFHRWNNYMMDWKNQFN

SEQ ID NO: 7679 - protein, 18 aa, Artificial sequence
  synthetic peptide
GFHRWNNYMMDWKNQFND

SEQ ID NO: 7680 - protein, 18 aa, Artificial sequence
  synthetic peptide
FHRWNNYMMDWKNQFNDY

SEQ ID NO: 7681 - protein, 18 aa, Artificial sequence
  synthetic peptide
HRWNNYMMDWKNQFNDYT

SEQ ID NO: 7682 - protein, 18 aa, Artificial sequence
  synthetic peptide
RWNNYMMDWKNQFNDYTS

SEQ ID NO: 7683 - protein, 18 aa, Artificial sequence
  synthetic peptide
WNNYMMDWKNQFNDYTSK

SEQ ID NO: 7684 - protein, 18 aa, Artificial sequence
  synthetic peptide
NNYMMDWKNQFNDYTSKK

SEQ ID NO: 7685 - protein, 18 aa, Artificial sequence
  synthetic peptide
NYMMDWKNQFNDYTSKKE

SEQ ID NO: 7686 - protein, 18 aa, Artificial sequence
  synthetic peptide
YMMDWKNQFNDYTSKKES

SEQ ID NO: 7687 - protein, 18 aa, Artificial sequence
  synthetic peptide
MMDWKNQFNDYTSKKESC

SEQ ID NO: 7688 - protein, 18 aa, Artificial sequence
  synthetic peptide
MDWKNQFNDYTSKKESCV

SEQ ID NO: 7689 - protein, 18 aa, Artificial sequence
  synthetic peptide
DWKNQFNDYTSKKESCVG

SEQ ID NO: 7690 - protein, 18 aa, Artificial sequence
  synthetic peptide
WKNQFNDYTSKKESCVGL

SEQ ID NO: 7691 - protein, 19 aa, Artificial sequence
  synthetic peptide
MHSKVTIICIRFLFWFLLL

SEQ ID NO: 7692 - protein, 19 aa, Artificial sequence
  synthetic peptide
HSKVTIICIRFLFWFLLLC

SEQ ID NO: 7693 - protein, 19 aa, Artificial sequence
  synthetic peptide
SKVTIICIRFLFWFLLLCM

SEQ ID NO: 7694 - protein, 19 aa, Artificial sequence
  synthetic peptide
KVTIICIRFLFWFLLLCML

SEQ ID NO: 7695 - protein, 19 aa, Artificial sequence
  synthetic peptide
VTIICIRFLFWFLLLCMLI

SEQ ID NO: 7696 - protein, 19 aa, Artificial sequence
  synthetic peptide
TIICIRFLFWFLLLCMLIG

SEQ ID NO: 7697 - protein, 19 aa, Artificial sequence
  synthetic peptide
IICIRFLFWFLLLCMLIGK

SEQ ID NO: 7698 - protein, 19 aa, Artificial sequence
  synthetic peptide
ICIRFLFWFLLLCMLIGKS

SEQ ID NO: 7699 - protein, 19 aa, Artificial sequence
  synthetic peptide
CIRFLFWFLLLCMLIGKSH

SEQ ID NO: 7700 - protein, 19 aa, Artificial sequence
  synthetic peptide
IRFLFWFLLLCMLIGKSHT

SEQ ID NO: 7701 - protein, 19 aa, Artificial sequence
  synthetic peptide
RFLFWFLLLCMLIGKSHTE

SEQ ID NO: 7702 - protein, 19 aa, Artificial sequence
  synthetic peptide
FLFWFLLLCMLIGKSHTED

SEQ ID NO: 7703 - protein, 19 aa, Artificial sequence
  synthetic peptide
LFWFLLLCMLIGKSHTEDD

SEQ ID NO: 7704 - protein, 19 aa, Artificial sequence
  synthetic peptide
FWFLLLCMLIGKSHTEDDI

SEQ ID NO: 7705 - protein, 19 aa, Artificial sequence
  synthetic peptide
WFLLLCMLIGKSHTEDDII

SEQ ID NO: 7706 - protein, 19 aa, Artificial sequence
  synthetic peptide
FLLLCMLIGKSHTEDDIII

SEQ ID NO: 7707 - protein, 19 aa, Artificial sequence
  synthetic peptide
LLLCMLIGKSHTEDDIIIA

SEQ ID NO: 7708 - protein, 19 aa, Artificial sequence
  synthetic peptide
LLCMLIGKSHTEDDIIIAT

SEQ ID NO: 7709 - protein, 19 aa, Artificial sequence
  synthetic peptide
LCMLIGKSHTEDDIIIATK

SEQ ID NO: 7710 - protein, 19 aa, Artificial sequence
  synthetic peptide
CMLIGKSHTEDDIIIATKN

SEQ ID NO: 7711 - protein, 19 aa, Artificial sequence
  synthetic peptide
MLIGKSHTEDDIIIATKNG

SEQ ID NO: 7712 - protein, 19 aa, Artificial sequence
  synthetic peptide
LIGKSHTEDDIIIATKNGK

SEQ ID NO: 7713 - protein, 19 aa, Artificial sequence
  synthetic peptide
IGKSHTEDDIIIATKNGKV

SEQ ID NO: 7714 - protein, 19 aa, Artificial sequence
  synthetic peptide
GKSHTEDDIIIATKNGKVR

SEQ ID NO: 7715 - protein, 19 aa, Artificial sequence
  synthetic peptide
KSHTEDDIIIATKNGKVRG

SEQ ID NO: 7716 - protein, 19 aa, Artificial sequence
  synthetic peptide
SHTEDDIIIATKNGKVRGM

SEQ ID NO: 7717 - protein, 19 aa, Artificial sequence
  synthetic peptide
HTEDDIIIATKNGKVRGMN

SEQ ID NO: 7718 - protein, 19 aa, Artificial sequence
  synthetic peptide
TEDDIIIATKNGKVRGMNL

SEQ ID NO: 7719 - protein, 19 aa, Artificial sequence
  synthetic peptide
EDDIIIATKNGKVRGMNLT

SEQ ID NO: 7720 - protein, 19 aa, Artificial sequence
  synthetic peptide
DDIIIATKNGKVRGMNLTV

SEQ ID NO: 7721 - protein, 19 aa, Artificial sequence
  synthetic peptide
DIIIATKNGKVRGMNLTVF

SEQ ID NO: 7722 - protein, 19 aa, Artificial sequence
  synthetic peptide
IIIATKNGKVRGMNLTVFG

SEQ ID NO: 7723 - protein, 19 aa, Artificial sequence
  synthetic peptide
IIATKNGKVRGMNLTVFGG

SEQ ID NO: 7724 - protein, 19 aa, Artificial sequence
  synthetic peptide
IATKNGKVRGMNLTVFGGT

SEQ ID NO: 7725 - protein, 19 aa, Artificial sequence
  synthetic peptide
ATKNGKVRGMNLTVFGGTV

SEQ ID NO: 7726 - protein, 19 aa, Artificial sequence
  synthetic peptide
TKNGKVRGMNLTVFGGTVT

SEQ ID NO: 7727 - protein, 19 aa, Artificial sequence
  synthetic peptide
KNGKVRGMNLTVFGGTVTA

SEQ ID NO: 7728 - protein, 19 aa, Artificial sequence
  synthetic peptide
NGKVRGMNLTVFGGTVTAF

SEQ ID NO: 7729 - protein, 19 aa, Artificial sequence
  synthetic peptide
GKVRGMNLTVFGGTVTAFL

SEQ ID NO: 7730 - protein, 19 aa, Artificial sequence
  synthetic peptide
KVRGMNLTVFGGTVTAFLG

SEQ ID NO: 7731 - protein, 19 aa, Artificial sequence
  synthetic peptide
VRGMNLTVFGGTVTAFLGI

SEQ ID NO: 7732 - protein, 19 aa, Artificial sequence
  synthetic peptide
RGMNLTVFGGTVTAFLGIP

SEQ ID NO: 7733 - protein, 19 aa, Artificial sequence
  synthetic peptide
GMNLTVFGGTVTAFLGIPY

SEQ ID NO: 7734 - protein, 19 aa, Artificial sequence
  synthetic peptide
MNLTVFGGTVTAFLGIPYA

SEQ ID NO: 7735 - protein, 19 aa, Artificial sequence
  synthetic peptide
NLTVFGGTVTAFLGIPYAQ

SEQ ID NO: 7736 - protein, 19 aa, Artificial sequence
  synthetic peptide
LTVFGGTVTAFLGIPYAQP

SEQ ID NO: 7737 - protein, 19 aa, Artificial sequence
  synthetic peptide
TVFGGTVTAFLGIPYAQPP

SEQ ID NO: 7738 - protein, 19 aa, Artificial sequence
  synthetic peptide
VFGGTVTAFLGIPYAQPPL

SEQ ID NO: 7739 - protein, 19 aa, Artificial sequence
  synthetic peptide
FGGTVTAFLGIPYAQPPLG

SEQ ID NO: 7740 - protein, 19 aa, Artificial sequence
  synthetic peptide
GGTVTAFLGIPYAQPPLGR

SEQ ID NO: 7741 - protein, 19 aa, Artificial sequence
  synthetic peptide
GTVTAFLGIPYAQPPLGRL

SEQ ID NO: 7742 - protein, 19 aa, Artificial sequence
  synthetic peptide
TVTAFLGIPYAQPPLGRLR

SEQ ID NO: 7743 - protein, 19 aa, Artificial sequence
  synthetic peptide
VTAFLGIPYAQPPLGRLRF

SEQ ID NO: 7744 - protein, 19 aa, Artificial sequence
  synthetic peptide
TAFLGIPYAQPPLGRLRFK

SEQ ID NO: 7745 - protein, 19 aa, Artificial sequence
  synthetic peptide
AFLGIPYAQPPLGRLRFKK

SEQ ID NO: 7746 - protein, 19 aa, Artificial sequence
  synthetic peptide
FLGIPYAQPPLGRLRFKKP

SEQ ID NO: 7747 - protein, 19 aa, Artificial sequence
  synthetic peptide
LGIPYAQPPLGRLRFKKPQ

SEQ ID NO: 7748 - protein, 19 aa, Artificial sequence
  synthetic peptide
GIPYAQPPLGRLRFKKPQS

SEQ ID NO: 7749 - protein, 19 aa, Artificial sequence
  synthetic peptide
IPYAQPPLGRLRFKKPQSL

SEQ ID NO: 7750 - protein, 19 aa, Artificial sequence
  synthetic peptide
PYAQPPLGRLRFKKPQSLT

SEQ ID NO: 7751 - protein, 19 aa, Artificial sequence
  synthetic peptide
YAQPPLGRLRFKKPQSLTK

SEQ ID NO: 7752 - protein, 19 aa, Artificial sequence
  synthetic peptide
AQPPLGRLRFKKPQSLTKW

SEQ ID NO: 7753 - protein, 19 aa, Artificial sequence
  synthetic peptide
QPPLGRLRFKKPQSLTKWS

SEQ ID NO: 7754 - protein, 19 aa, Artificial sequence
  synthetic peptide
PPLGRLRFKKPQSLTKWSD

SEQ ID NO: 7755 - protein, 19 aa, Artificial sequence
  synthetic peptide
PLGRLRFKKPQSLTKWSDI

SEQ ID NO: 7756 - protein, 19 aa, Artificial sequence
  synthetic peptide
LGRLRFKKPQSLTKWSDIW

SEQ ID NO: 7757 - protein, 19 aa, Artificial sequence
  synthetic peptide
GRLRFKKPQSLTKWSDIWN

SEQ ID NO: 7758 - protein, 19 aa, Artificial sequence
  synthetic peptide
RLRFKKPQSLTKWSDIWNA

SEQ ID NO: 7759 - protein, 19 aa, Artificial sequence
  synthetic peptide
LRFKKPQSLTKWSDIWNAT

SEQ ID NO: 7760 - protein, 19 aa, Artificial sequence
  synthetic peptide
RFKKPQSLTKWSDIWNATK

SEQ ID NO: 7761 - protein, 19 aa, Artificial sequence
  synthetic peptide
FKKPQSLTKWSDIWNATKY

SEQ ID NO: 7762 - protein, 19 aa, Artificial sequence
  synthetic peptide
KKPQSLTKWSDIWNATKYA

SEQ ID NO: 7763 - protein, 19 aa, Artificial sequence
  synthetic peptide
KPQSLTKWSDIWNATKYAN

SEQ ID NO: 7764 - protein, 19 aa, Artificial sequence
  synthetic peptide
PQSLTKWSDIWNATKYANS

SEQ ID NO: 7765 - protein, 19 aa, Artificial sequence
  synthetic peptide
QSLTKWSDIWNATKYANSC

SEQ ID NO: 7766 - protein, 19 aa, Artificial sequence
  synthetic peptide
SLTKWSDIWNATKYANSCC

SEQ ID NO: 7767 - protein, 19 aa, Artificial sequence
  synthetic peptide
LTKWSDIWNATKYANSCCQ

SEQ ID NO: 7768 - protein, 19 aa, Artificial sequence
  synthetic peptide
TKWSDIWNATKYANSCCQN

SEQ ID NO: 7769 - protein, 19 aa, Artificial sequence
  synthetic peptide
KWSDIWNATKYANSCCQNI

SEQ ID NO: 7770 - protein, 19 aa, Artificial sequence
  synthetic peptide
WSDIWNATKYANSCCQNID

SEQ ID NO: 7771 - protein, 19 aa, Artificial sequence
  synthetic peptide
SDIWNATKYANSCCQNIDQ

SEQ ID NO: 7772 - protein, 19 aa, Artificial sequence
  synthetic peptide
DIWNATKYANSCCQNIDQS

SEQ ID NO: 7773 - protein, 19 aa, Artificial sequence
  synthetic peptide
IWNATKYANSCCQNIDQSF

SEQ ID NO: 7774 - protein, 19 aa, Artificial sequence
  synthetic peptide
WNATKYANSCCQNIDQSFP

SEQ ID NO: 7775 - protein, 19 aa, Artificial sequence
  synthetic peptide
NATKYANSCCQNIDQSFPG

SEQ ID NO: 7776 - protein, 19 aa, Artificial sequence
  synthetic peptide
ATKYANSCCQNIDQSFPGF

SEQ ID NO: 7777 - protein, 19 aa, Artificial sequence
  synthetic peptide
TKYANSCCQNIDQSFPGFH

SEQ ID NO: 7778 - protein, 19 aa, Artificial sequence
  synthetic peptide
KYANSCCQNIDQSFPGFHG

SEQ ID NO: 7779 - protein, 19 aa, Artificial sequence
  synthetic peptide
YANSCCQNIDQSFPGFHGS

SEQ ID NO: 7780 - protein, 19 aa, Artificial sequence
  synthetic peptide
ANSCCQNIDQSFPGFHGSE

SEQ ID NO: 7781 - protein, 19 aa, Artificial sequence
  synthetic peptide
NSCCQNIDQSFPGFHGSEM

SEQ ID NO: 7782 - protein, 19 aa, Artificial sequence
  synthetic peptide
SCCQNIDQSFPGFHGSEMW

SEQ ID NO: 7783 - protein, 19 aa, Artificial sequence
  synthetic peptide
CCQNIDQSFPGFHGSEMWN

SEQ ID NO: 7784 - protein, 19 aa, Artificial sequence
  synthetic peptide
CQNIDQSFPGFHGSEMWNP

SEQ ID NO: 7785 - protein, 19 aa, Artificial sequence
  synthetic peptide
QNIDQSFPGFHGSEMWNPN

SEQ ID NO: 7786 - protein, 19 aa, Artificial sequence
  synthetic peptide
NIDQSFPGFHGSEMWNPNT

SEQ ID NO: 7787 - protein, 19 aa, Artificial sequence
  synthetic peptide
IDQSFPGFHGSEMWNPNTD

SEQ ID NO: 7788 - protein, 19 aa, Artificial sequence
  synthetic peptide
DQSFPGFHGSEMWNPNTDL

SEQ ID NO: 7789 - protein, 19 aa, Artificial sequence
  synthetic peptide
QSFPGFHGSEMWNPNTDLS

SEQ ID NO: 7790 - protein, 19 aa, Artificial sequence
  synthetic peptide
SFPGFHGSEMWNPNTDLSE

SEQ ID NO: 7791 - protein, 19 aa, Artificial sequence
  synthetic peptide
FPGFHGSEMWNPNTDLSED

SEQ ID NO: 7792 - protein, 19 aa, Artificial sequence
  synthetic peptide
PGFHGSEMWNPNTDLSEDC

SEQ ID NO: 7793 - protein, 19 aa, Artificial sequence
  synthetic peptide
GFHGSEMWNPNTDLSEDCL

SEQ ID NO: 7794 - protein, 19 aa, Artificial sequence
  synthetic peptide
FHGSEMWNPNTDLSEDCLY

SEQ ID NO: 7795 - protein, 19 aa, Artificial sequence
  synthetic peptide
HGSEMWNPNTDLSEDCLYL

SEQ ID NO: 7796 - protein, 19 aa, Artificial sequence
  synthetic peptide
GSEMWNPNTDLSEDCLYLN

SEQ ID NO: 7797 - protein, 19 aa, Artificial sequence
  synthetic peptide
SEMWNPNTDLSEDCLYLNV

SEQ ID NO: 7798 - protein, 19 aa, Artificial sequence
  synthetic peptide
EMWNPNTDLSEDCLYLNVW

SEQ ID NO: 7799 - protein, 19 aa, Artificial sequence
  synthetic peptide
MWNPNTDLSEDCLYLNVWI

SEQ ID NO: 7800 - protein, 19 aa, Artificial sequence
  synthetic peptide
WNPNTDLSEDCLYLNVWIP

SEQ ID NO: 7801 - protein, 19 aa, Artificial sequence
  synthetic peptide
NPNTDLSEDCLYLNVWIPA

SEQ ID NO: 7802 - protein, 19 aa, Artificial sequence
  synthetic peptide
PNTDLSEDCLYLNVWIPAP

SEQ ID NO: 7803 - protein, 19 aa, Artificial sequence
  synthetic peptide
NTDLSEDCLYLNVWIPAPK

SEQ ID NO: 7804 - protein, 19 aa, Artificial sequence
  synthetic peptide
TDLSEDCLYLNVWIPAPKP

SEQ ID NO: 7805 - protein, 19 aa, Artificial sequence
  synthetic peptide
DLSEDCLYLNVWIPAPKPK

SEQ ID NO: 7806 - protein, 19 aa, Artificial sequence
  synthetic peptide
LSEDCLYLNVWIPAPKPKN

SEQ ID NO: 7807 - protein, 19 aa, Artificial sequence
  synthetic peptide
SEDCLYLNVWIPAPKPKNA

SEQ ID NO: 7808 - protein, 19 aa, Artificial sequence
  synthetic peptide
EDCLYLNVWIPAPKPKNAT

SEQ ID NO: 7809 - protein, 19 aa, Artificial sequence
  synthetic peptide
DCLYLNVWIPAPKPKNATV

SEQ ID NO: 7810 - protein, 19 aa, Artificial sequence
  synthetic peptide
CLYLNVWIPAPKPKNATVL

SEQ ID NO: 7811 - protein, 19 aa, Artificial sequence
  synthetic peptide
LYLNVWIPAPKPKNATVLI

SEQ ID NO: 7812 - protein, 19 aa, Artificial sequence
  synthetic peptide
YLNVWIPAPKPKNATVLIW

SEQ ID NO: 7813 - protein, 19 aa, Artificial sequence
  synthetic peptide
LNVWIPAPKPKNATVLIWI

SEQ ID NO: 7814 - protein, 19 aa, Artificial sequence
  synthetic peptide
NVWIPAPKPKNATVLIWIY

SEQ ID NO: 7815 - protein, 19 aa, Artificial sequence
  synthetic peptide
VWIPAPKPKNATVLIWIYG

SEQ ID NO: 7816 - protein, 19 aa, Artificial sequence
  synthetic peptide
WIPAPKPKNATVLIWIYGG

SEQ ID NO: 7817 - protein, 19 aa, Artificial sequence
  synthetic peptide
IPAPKPKNATVLIWIYGGG

SEQ ID NO: 7818 - protein, 19 aa, Artificial sequence
  synthetic peptide
PAPKPKNATVLIWIYGGGF

SEQ ID NO: 7819 - protein, 19 aa, Artificial sequence
  synthetic peptide
APKPKNATVLIWIYGGGFQ

SEQ ID NO: 7820 - protein, 19 aa, Artificial sequence
  synthetic peptide
PKPKNATVLIWIYGGGFQT

SEQ ID NO: 7821 - protein, 19 aa, Artificial sequence
  synthetic peptide
KPKNATVLIWIYGGGFQTG

SEQ ID NO: 7822 - protein, 19 aa, Artificial sequence
  synthetic peptide
PKNATVLIWIYGGGFQTGT

SEQ ID NO: 7823 - protein, 19 aa, Artificial sequence
  synthetic peptide
KNATVLIWIYGGGFQTGTS

SEQ ID NO: 7824 - protein, 19 aa, Artificial sequence
  synthetic peptide
NATVLIWIYGGGFQTGTSS

SEQ ID NO: 7825 - protein, 19 aa, Artificial sequence
  synthetic peptide
ATVLIWIYGGGFQTGTSSL

SEQ ID NO: 7826 - protein, 19 aa, Artificial sequence
  synthetic peptide
TVLIWIYGGGFQTGTSSLH

SEQ ID NO: 7827 - protein, 19 aa, Artificial sequence
  synthetic peptide
VLIWIYGGGFQTGTSSLHV

SEQ ID NO: 7828 - protein, 19 aa, Artificial sequence
  synthetic peptide
LIWIYGGGFQTGTSSLHVY

SEQ ID NO: 7829 - protein, 19 aa, Artificial sequence
  synthetic peptide
IWIYGGGFQTGTSSLHVYD

SEQ ID NO: 7830 - protein, 19 aa, Artificial sequence
  synthetic peptide
WIYGGGFQTGTSSLHVYDG

SEQ ID NO: 7831 - protein, 19 aa, Artificial sequence
  synthetic peptide
IYGGGFQTGTSSLHVYDGK

SEQ ID NO: 7832 - protein, 19 aa, Artificial sequence
  synthetic peptide
YGGGFQTGTSSLHVYDGKF

SEQ ID NO: 7833 - protein, 19 aa, Artificial sequence
  synthetic peptide
GGGFQTGTSSLHVYDGKFL

SEQ ID NO: 7834 - protein, 19 aa, Artificial sequence
  synthetic peptide
GGFQTGTSSLHVYDGKFLA

SEQ ID NO: 7835 - protein, 19 aa, Artificial sequence
  synthetic peptide
GFQTGTSSLHVYDGKFLAR

SEQ ID NO: 7836 - protein, 19 aa, Artificial sequence
  synthetic peptide
FQTGTSSLHVYDGKFLARV

SEQ ID NO: 7837 - protein, 19 aa, Artificial sequence
  synthetic peptide
QTGTSSLHVYDGKFLARVE

SEQ ID NO: 7838 - protein, 19 aa, Artificial sequence
  synthetic peptide
TGTSSLHVYDGKFLARVER

SEQ ID NO: 7839 - protein, 19 aa, Artificial sequence
  synthetic peptide
GTSSLHVYDGKFLARVERV

SEQ ID NO: 7840 - protein, 19 aa, Artificial sequence
  synthetic peptide
TSSLHVYDGKFLARVERVI

SEQ ID NO: 7841 - protein, 19 aa, Artificial sequence
  synthetic peptide
SSLHVYDGKFLARVERVIV

SEQ ID NO: 7842 - protein, 19 aa, Artificial sequence
  synthetic peptide
SLHVYDGKFLARVERVIVV

SEQ ID NO: 7843 - protein, 19 aa, Artificial sequence
  synthetic peptide
LHVYDGKFLARVERVIVVS

SEQ ID NO: 7844 - protein, 19 aa, Artificial sequence
  synthetic peptide
HVYDGKFLARVERVIVVSM

SEQ ID NO: 7845 - protein, 19 aa, Artificial sequence
  synthetic peptide
VYDGKFLARVERVIVVSMN

SEQ ID NO: 7846 - protein, 19 aa, Artificial sequence
  synthetic peptide
YDGKFLARVERVIVVSMNY

SEQ ID NO: 7847 - protein, 19 aa, Artificial sequence
  synthetic peptide
DGKFLARVERVIVVSMNYR

SEQ ID NO: 7848 - protein, 19 aa, Artificial sequence
  synthetic peptide
GKFLARVERVIVVSMNYRV

SEQ ID NO: 7849 - protein, 19 aa, Artificial sequence
  synthetic peptide
KFLARVERVIVVSMNYRVG

SEQ ID NO: 7850 - protein, 19 aa, Artificial sequence
  synthetic peptide
FLARVERVIVVSMNYRVGA

SEQ ID NO: 7851 - protein, 19 aa, Artificial sequence
  synthetic peptide
LARVERVIVVSMNYRVGAL

SEQ ID NO: 7852 - protein, 19 aa, Artificial sequence
  synthetic peptide
ARVERVIVVSMNYRVGALG

SEQ ID NO: 7853 - protein, 19 aa, Artificial sequence
  synthetic peptide
RVERVIVVSMNYRVGALGF

SEQ ID NO: 7854 - protein, 19 aa, Artificial sequence
  synthetic peptide
VERVIVVSMNYRVGALGFL

SEQ ID NO: 7855 - protein, 19 aa, Artificial sequence
  synthetic peptide
ERVIVVSMNYRVGALGFLA

SEQ ID NO: 7856 - protein, 19 aa, Artificial sequence
  synthetic peptide
RVIVVSMNYRVGALGFLAL

SEQ ID NO: 7857 - protein, 19 aa, Artificial sequence
  synthetic peptide
VIVVSMNYRVGALGFLALP

SEQ ID NO: 7858 - protein, 19 aa, Artificial sequence
  synthetic peptide
IVVSMNYRVGALGFLALPG

SEQ ID NO: 7859 - protein, 19 aa, Artificial sequence
  synthetic peptide
VVSMNYRVGALGFLALPGN

SEQ ID NO: 7860 - protein, 19 aa, Artificial sequence
  synthetic peptide
VSMNYRVGALGFLALPGNP

SEQ ID NO: 7861 - protein, 19 aa, Artificial sequence
  synthetic peptide
SMNYRVGALGFLALPGNPE

SEQ ID NO: 7862 - protein, 19 aa, Artificial sequence
  synthetic peptide
MNYRVGALGFLALPGNPEA

SEQ ID NO: 7863 - protein, 19 aa, Artificial sequence
  synthetic peptide
NYRVGALGFLALPGNPEAP

SEQ ID NO: 7864 - protein, 19 aa, Artificial sequence
  synthetic peptide
YRVGALGFLALPGNPEAPG

SEQ ID NO: 7865 - protein, 19 aa, Artificial sequence
  synthetic peptide
RVGALGFLALPGNPEAPGN

SEQ ID NO: 7866 - protein, 19 aa, Artificial sequence
  synthetic peptide
VGALGFLALPGNPEAPGNM

SEQ ID NO: 7867 - protein, 19 aa, Artificial sequence
  synthetic peptide
GALGFLALPGNPEAPGNMG

SEQ ID NO: 7868 - protein, 19 aa, Artificial sequence
  synthetic peptide
ALGFLALPGNPEAPGNMGL

SEQ ID NO: 7869 - protein, 19 aa, Artificial sequence
  synthetic peptide
LGFLALPGNPEAPGNMGLF

SEQ ID NO: 7870 - protein, 19 aa, Artificial sequence
  synthetic peptide
GFLALPGNPEAPGNMGLFD

SEQ ID NO: 7871 - protein, 19 aa, Artificial sequence
  synthetic peptide
FLALPGNPEAPGNMGLFDQ

SEQ ID NO: 7872 - protein, 19 aa, Artificial sequence
  synthetic peptide
LALPGNPEAPGNMGLFDQQ

SEQ ID NO: 7873 - protein, 19 aa, Artificial sequence
  synthetic peptide
ALPGNPEAPGNMGLFDQQL

SEQ ID NO: 7874 - protein, 19 aa, Artificial sequence
  synthetic peptide
LPGNPEAPGNMGLFDQQLA

SEQ ID NO: 7875 - protein, 19 aa, Artificial sequence
  synthetic peptide
PGNPEAPGNMGLFDQQLAL

SEQ ID NO: 7876 - protein, 19 aa, Artificial sequence
  synthetic peptide
GNPEAPGNMGLFDQQLALQ

SEQ ID NO: 7877 - protein, 19 aa, Artificial sequence
  synthetic peptide
NPEAPGNMGLFDQQLALQW

SEQ ID NO: 7878 - protein, 19 aa, Artificial sequence
  synthetic peptide
PEAPGNMGLFDQQLALQWV

SEQ ID NO: 7879 - protein, 19 aa, Artificial sequence
  synthetic peptide
EAPGNMGLFDQQLALQWVQ

SEQ ID NO: 7880 - protein, 19 aa, Artificial sequence
  synthetic peptide
APGNMGLFDQQLALQWVQK

SEQ ID NO: 7881 - protein, 19 aa, Artificial sequence
  synthetic peptide
PGNMGLFDQQLALQWVQKN

SEQ ID NO: 7882 - protein, 19 aa, Artificial sequence
  synthetic peptide
GNMGLFDQQLALQWVQKNI

SEQ ID NO: 7883 - protein, 19 aa, Artificial sequence
  synthetic peptide
NMGLFDQQLALQWVQKNIA

SEQ ID NO: 7884 - protein, 19 aa, Artificial sequence
  synthetic peptide
MGLFDQQLALQWVQKNIAA

SEQ ID NO: 7885 - protein, 19 aa, Artificial sequence
  synthetic peptide
GLFDQQLALQWVQKNIAAF

SEQ ID NO: 7886 - protein, 19 aa, Artificial sequence
  synthetic peptide
LFDQQLALQWVQKNIAAFG

SEQ ID NO: 7887 - protein, 19 aa, Artificial sequence
  synthetic peptide
FDQQLALQWVQKNIAAFGG

SEQ ID NO: 7888 - protein, 19 aa, Artificial sequence
  synthetic peptide
DQQLALQWVQKNIAAFGGN

SEQ ID NO: 7889 - protein, 19 aa, Artificial sequence
  synthetic peptide
QQLALQWVQKNIAAFGGNP

SEQ ID NO: 7890 - protein, 19 aa, Artificial sequence
  synthetic peptide
QLALQWVQKNIAAFGGNPK

SEQ ID NO: 7891 - protein, 19 aa, Artificial sequence
  synthetic peptide
LALQWVQKNIAAFGGNPKS

SEQ ID NO: 7892 - protein, 19 aa, Artificial sequence
  synthetic peptide
ALQWVQKNIAAFGGNPKSV

SEQ ID NO: 7893 - protein, 19 aa, Artificial sequence
  synthetic peptide
LQWVQKNIAAFGGNPKSVT

SEQ ID NO: 7894 - protein, 19 aa, Artificial sequence
  synthetic peptide
QWVQKNIAAFGGNPKSVTL

SEQ ID NO: 7895 - protein, 19 aa, Artificial sequence
  synthetic peptide
WVQKNIAAFGGNPKSVTLF

SEQ ID NO: 7896 - protein, 19 aa, Artificial sequence
  synthetic peptide
VQKNIAAFGGNPKSVTLFG

SEQ ID NO: 7897 - protein, 19 aa, Artificial sequence
  synthetic peptide
QKNIAAFGGNPKSVTLFGE

SEQ ID NO: 7898 - protein, 19 aa, Artificial sequence
  synthetic peptide
KNIAAFGGNPKSVTLFGES

SEQ ID NO: 7899 - protein, 19 aa, Artificial sequence
  synthetic peptide
NIAAFGGNPKSVTLFGESA

SEQ ID NO: 7900 - protein, 19 aa, Artificial sequence
  synthetic peptide
IAAFGGNPKSVTLFGESAG

SEQ ID NO: 7901 - protein, 19 aa, Artificial sequence
  synthetic peptide
AAFGGNPKSVTLFGESAGA

SEQ ID NO: 7902 - protein, 19 aa, Artificial sequence
  synthetic peptide
AFGGNPKSVTLFGESAGAA

SEQ ID NO: 7903 - protein, 19 aa, Artificial sequence
  synthetic peptide
FGGNPKSVTLFGESAGAAS

SEQ ID NO: 7904 - protein, 19 aa, Artificial sequence
  synthetic peptide
GGNPKSVTLFGESAGAASV

SEQ ID NO: 7905 - protein, 19 aa, Artificial sequence
  synthetic peptide
GNPKSVTLFGESAGAASVS

SEQ ID NO: 7906 - protein, 19 aa, Artificial sequence
  synthetic peptide
NPKSVTLFGESAGAASVSL

SEQ ID NO: 7907 - protein, 19 aa, Artificial sequence
  synthetic peptide
PKSVTLFGESAGAASVSLH

SEQ ID NO: 7908 - protein, 19 aa, Artificial sequence
  synthetic peptide
KSVTLFGESAGAASVSLHL

SEQ ID NO: 7909 - protein, 19 aa, Artificial sequence
  synthetic peptide
SVTLFGESAGAASVSLHLL

SEQ ID NO: 7910 - protein, 19 aa, Artificial sequence
  synthetic peptide
VTLFGESAGAASVSLHLLS

SEQ ID NO: 7911 - protein, 19 aa, Artificial sequence
  synthetic peptide
TLFGESAGAASVSLHLLSP

SEQ ID NO: 7912 - protein, 19 aa, Artificial sequence
  synthetic peptide
LFGESAGAASVSLHLLSPG

SEQ ID NO: 7913 - protein, 19 aa, Artificial sequence
  synthetic peptide
FGESAGAASVSLHLLSPGS

SEQ ID NO: 7914 - protein, 19 aa, Artificial sequence
  synthetic peptide
GESAGAASVSLHLLSPGSH

SEQ ID NO: 7915 - protein, 19 aa, Artificial sequence
  synthetic peptide
ESAGAASVSLHLLSPGSHS

SEQ ID NO: 7916 - protein, 19 aa, Artificial sequence
  synthetic peptide
SAGAASVSLHLLSPGSHSL

SEQ ID NO: 7917 - protein, 19 aa, Artificial sequence
  synthetic peptide
AGAASVSLHLLSPGSHSLF

SEQ ID NO: 7918 - protein, 19 aa, Artificial sequence
  synthetic peptide
GAASVSLHLLSPGSHSLFT

SEQ ID NO: 7919 - protein, 19 aa, Artificial sequence
  synthetic peptide
AASVSLHLLSPGSHSLFTR

SEQ ID NO: 7920 - protein, 19 aa, Artificial sequence
  synthetic peptide
ASVSLHLLSPGSHSLFTRA

SEQ ID NO: 7921 - protein, 19 aa, Artificial sequence
  synthetic peptide
SVSLHLLSPGSHSLFTRAI

SEQ ID NO: 7922 - protein, 19 aa, Artificial sequence
  synthetic peptide
VSLHLLSPGSHSLFTRAIL

SEQ ID NO: 7923 - protein, 19 aa, Artificial sequence
  synthetic peptide
SLHLLSPGSHSLFTRAILQ

SEQ ID NO: 7924 - protein, 19 aa, Artificial sequence
  synthetic peptide
LHLLSPGSHSLFTRAILQS

SEQ ID NO: 7925 - protein, 19 aa, Artificial sequence
  synthetic peptide
HLLSPGSHSLFTRAILQSG

SEQ ID NO: 7926 - protein, 19 aa, Artificial sequence
  synthetic peptide
LLSPGSHSLFTRAILQSGS

SEQ ID NO: 7927 - protein, 19 aa, Artificial sequence
  synthetic peptide
LSPGSHSLFTRAILQSGSF

SEQ ID NO: 7928 - protein, 19 aa, Artificial sequence
  synthetic peptide
SPGSHSLFTRAILQSGSFN

SEQ ID NO: 7929 - protein, 19 aa, Artificial sequence
  synthetic peptide
PGSHSLFTRAILQSGSFNA

SEQ ID NO: 7930 - protein, 19 aa, Artificial sequence
  synthetic peptide
GSHSLFTRAILQSGSFNAP

SEQ ID NO: 7931 - protein, 19 aa, Artificial sequence
  synthetic peptide
SHSLFTRAILQSGSFNAPW

SEQ ID NO: 7932 - protein, 19 aa, Artificial sequence
  synthetic peptide
HSLFTRAILQSGSFNAPWA

SEQ ID NO: 7933 - protein, 19 aa, Artificial sequence
  synthetic peptide
SLFTRAILQSGSFNAPWAV

SEQ ID NO: 7934 - protein, 19 aa, Artificial sequence
  synthetic peptide
LFTRAILQSGSFNAPWAVT

SEQ ID NO: 7935 - protein, 19 aa, Artificial sequence
  synthetic peptide
FTRAILQSGSFNAPWAVTS

SEQ ID NO: 7936 - protein, 19 aa, Artificial sequence
  synthetic peptide
TRAILQSGSFNAPWAVTSL

SEQ ID NO: 7937 - protein, 19 aa, Artificial sequence
  synthetic peptide
RAILQSGSFNAPWAVTSLY

SEQ ID NO: 7938 - protein, 19 aa, Artificial sequence
  synthetic peptide
AILQSGSFNAPWAVTSLYE

SEQ ID NO: 7939 - protein, 19 aa, Artificial sequence
  synthetic peptide
ILQSGSFNAPWAVTSLYEA

SEQ ID NO: 7940 - protein, 19 aa, Artificial sequence
  synthetic peptide
LQSGSFNAPWAVTSLYEAR

SEQ ID NO: 7941 - protein, 19 aa, Artificial sequence
  synthetic peptide
QSGSFNAPWAVTSLYEARN

SEQ ID NO: 7942 - protein, 19 aa, Artificial sequence
  synthetic peptide
SGSFNAPWAVTSLYEARNR

SEQ ID NO: 7943 - protein, 19 aa, Artificial sequence
  synthetic peptide
GSFNAPWAVTSLYEARNRT

SEQ ID NO: 7944 - protein, 19 aa, Artificial sequence
  synthetic peptide
SFNAPWAVTSLYEARNRTL

SEQ ID NO: 7945 - protein, 19 aa, Artificial sequence
  synthetic peptide
FNAPWAVTSLYEARNRTLN

SEQ ID NO: 7946 - protein, 19 aa, Artificial sequence
  synthetic peptide
NAPWAVTSLYEARNRTLNL

SEQ ID NO: 7947 - protein, 19 aa, Artificial sequence
  synthetic peptide
APWAVTSLYEARNRTLNLA

SEQ ID NO: 7948 - protein, 19 aa, Artificial sequence
  synthetic peptide
PWAVTSLYEARNRTLNLAK

SEQ ID NO: 7949 - protein, 19 aa, Artificial sequence
  synthetic peptide
WAVTSLYEARNRTLNLAKL

SEQ ID NO: 7950 - protein, 19 aa, Artificial sequence
  synthetic peptide
AVTSLYEARNRTLNLAKLT

SEQ ID NO: 7951 - protein, 19 aa, Artificial sequence
  synthetic peptide
VTSLYEARNRTLNLAKLTG

SEQ ID NO: 7952 - protein, 19 aa, Artificial sequence
  synthetic peptide
TSLYEARNRTLNLAKLTGC

SEQ ID NO: 7953 - protein, 19 aa, Artificial sequence
  synthetic peptide
SLYEARNRTLNLAKLTGCS

SEQ ID NO: 7954 - protein, 19 aa, Artificial sequence
  synthetic peptide
LYEARNRTLNLAKLTGCSR

SEQ ID NO: 7955 - protein, 19 aa, Artificial sequence
  synthetic peptide
YEARNRTLNLAKLTGCSRE

SEQ ID NO: 7956 - protein, 19 aa, Artificial sequence
  synthetic peptide
EARNRTLNLAKLTGCSREN

SEQ ID NO: 7957 - protein, 19 aa, Artificial sequence
  synthetic peptide
ARNRTLNLAKLTGCSRENE

SEQ ID NO: 7958 - protein, 19 aa, Artificial sequence
  synthetic peptide
RNRTLNLAKLTGCSRENET

SEQ ID NO: 7959 - protein, 19 aa, Artificial sequence
  synthetic peptide
NRTLNLAKLTGCSRENETE

SEQ ID NO: 7960 - protein, 19 aa, Artificial sequence
  synthetic peptide
RTLNLAKLTGCSRENETEI

SEQ ID NO: 7961 - protein, 19 aa, Artificial sequence
  synthetic peptide
TLNLAKLTGCSRENETEII

SEQ ID NO: 7962 - protein, 19 aa, Artificial sequence
  synthetic peptide
LNLAKLTGCSRENETEIIK

SEQ ID NO: 7963 - protein, 19 aa, Artificial sequence
  synthetic peptide
NLAKLTGCSRENETEIIKC

SEQ ID NO: 7964 - protein, 19 aa, Artificial sequence
  synthetic peptide
LAKLTGCSRENETEIIKCL

SEQ ID NO: 7965 - protein, 19 aa, Artificial sequence
  synthetic peptide
AKLTGCSRENETEIIKCLR

SEQ ID NO: 7966 - protein, 19 aa, Artificial sequence
  synthetic peptide
KLTGCSRENETEIIKCLRN

SEQ ID NO: 7967 - protein, 19 aa, Artificial sequence
  synthetic peptide
LTGCSRENETEIIKCLRNK

SEQ ID NO: 7968 - protein, 19 aa, Artificial sequence
  synthetic peptide
TGCSRENETEIIKCLRNKD

SEQ ID NO: 7969 - protein, 19 aa, Artificial sequence
  synthetic peptide
GCSRENETEIIKCLRNKDP

SEQ ID NO: 7970 - protein, 19 aa, Artificial sequence
  synthetic peptide
CSRENETEIIKCLRNKDPQ

SEQ ID NO: 7971 - protein, 19 aa, Artificial sequence
  synthetic peptide
SRENETEIIKCLRNKDPQE

SEQ ID NO: 7972 - protein, 19 aa, Artificial sequence
  synthetic peptide
RENETEIIKCLRNKDPQEI

SEQ ID NO: 7973 - protein, 19 aa, Artificial sequence
  synthetic peptide
ENETEIIKCLRNKDPQEIL

SEQ ID NO: 7974 - protein, 19 aa, Artificial sequence
  synthetic peptide
NETEIIKCLRNKDPQEILL

SEQ ID NO: 7975 - protein, 19 aa, Artificial sequence
  synthetic peptide
ETEIIKCLRNKDPQEILLN

SEQ ID NO: 7976 - protein, 19 aa, Artificial sequence
  synthetic peptide
TEIIKCLRNKDPQEILLNE

SEQ ID NO: 7977 - protein, 19 aa, Artificial sequence
  synthetic peptide
EIIKCLRNKDPQEILLNEA

SEQ ID NO: 7978 - protein, 19 aa, Artificial sequence
  synthetic peptide
IIKCLRNKDPQEILLNEAF

SEQ ID NO: 7979 - protein, 19 aa, Artificial sequence
  synthetic peptide
IKCLRNKDPQEILLNEAFV

SEQ ID NO: 7980 - protein, 19 aa, Artificial sequence
  synthetic peptide
KCLRNKDPQEILLNEAFVV

SEQ ID NO: 7981 - protein, 19 aa, Artificial sequence
  synthetic peptide
CLRNKDPQEILLNEAFVVP

SEQ ID NO: 7982 - protein, 19 aa, Artificial sequence
  synthetic peptide
LRNKDPQEILLNEAFVVPY

SEQ ID NO: 7983 - protein, 19 aa, Artificial sequence
  synthetic peptide
RNKDPQEILLNEAFVVPYG

SEQ ID NO: 7984 - protein, 19 aa, Artificial sequence
  synthetic peptide
NKDPQEILLNEAFVVPYGT

SEQ ID NO: 7985 - protein, 19 aa, Artificial sequence
  synthetic peptide
KDPQEILLNEAFVVPYGTP

SEQ ID NO: 7986 - protein, 19 aa, Artificial sequence
  synthetic peptide
DPQEILLNEAFVVPYGTPL

SEQ ID NO: 7987 - protein, 19 aa, Artificial sequence
  synthetic peptide
PQEILLNEAFVVPYGTPLS

SEQ ID NO: 7988 - protein, 19 aa, Artificial sequence
  synthetic peptide
QEILLNEAFVVPYGTPLSV

SEQ ID NO: 7989 - protein, 19 aa, Artificial sequence
  synthetic peptide
EILLNEAFVVPYGTPLSVN

SEQ ID NO: 7990 - protein, 19 aa, Artificial sequence
  synthetic peptide
ILLNEAFVVPYGTPLSVNF

SEQ ID NO: 7991 - protein, 19 aa, Artificial sequence
  synthetic peptide
LLNEAFVVPYGTPLSVNFG

SEQ ID NO: 7992 - protein, 19 aa, Artificial sequence
  synthetic peptide
LNEAFVVPYGTPLSVNFGP

SEQ ID NO: 7993 - protein, 19 aa, Artificial sequence
  synthetic peptide
NEAFVVPYGTPLSVNFGPT

SEQ ID NO: 7994 - protein, 19 aa, Artificial sequence
  synthetic peptide
EAFVVPYGTPLSVNFGPTV

SEQ ID NO: 7995 - protein, 19 aa, Artificial sequence
  synthetic peptide
AFVVPYGTPLSVNFGPTVD

SEQ ID NO: 7996 - protein, 19 aa, Artificial sequence
  synthetic peptide
FVVPYGTPLSVNFGPTVDG

SEQ ID NO: 7997 - protein, 19 aa, Artificial sequence
  synthetic peptide
VVPYGTPLSVNFGPTVDGD

SEQ ID NO: 7998 - protein, 19 aa, Artificial sequence
  synthetic peptide
VPYGTPLSVNFGPTVDGDF

SEQ ID NO: 7999 - protein, 19 aa, Artificial sequence
  synthetic peptide
PYGTPLSVNFGPTVDGDFL

SEQ ID NO: 8000 - protein, 19 aa, Artificial sequence
  synthetic peptide
YGTPLSVNFGPTVDGDFLT

SEQ ID NO: 8001 - protein, 19 aa, Artificial sequence
  synthetic peptide
GTPLSVNFGPTVDGDFLTD

SEQ ID NO: 8002 - protein, 19 aa, Artificial sequence
  synthetic peptide
TPLSVNFGPTVDGDFLTDM

SEQ ID NO: 8003 - protein, 19 aa, Artificial sequence
  synthetic peptide
PLSVNFGPTVDGDFLTDMP

SEQ ID NO: 8004 - protein, 19 aa, Artificial sequence
  synthetic peptide
LSVNFGPTVDGDFLTDMPD

SEQ ID NO: 8005 - protein, 19 aa, Artificial sequence
  synthetic peptide
SVNFGPTVDGDFLTDMPDI

SEQ ID NO: 8006 - protein, 19 aa, Artificial sequence
  synthetic peptide
VNFGPTVDGDFLTDMPDIL

SEQ ID NO: 8007 - protein, 19 aa, Artificial sequence
  synthetic peptide
NFGPTVDGDFLTDMPDILL

SEQ ID NO: 8008 - protein, 19 aa, Artificial sequence
  synthetic peptide
FGPTVDGDFLTDMPDILLE

SEQ ID NO: 8009 - protein, 19 aa, Artificial sequence
  synthetic peptide
GPTVDGDFLTDMPDILLEL

SEQ ID NO: 8010 - protein, 19 aa, Artificial sequence
  synthetic peptide
PTVDGDFLTDMPDILLELG

SEQ ID NO: 8011 - protein, 19 aa, Artificial sequence
  synthetic peptide
TVDGDFLTDMPDILLELGQ

SEQ ID NO: 8012 - protein, 19 aa, Artificial sequence
  synthetic peptide
VDGDFLTDMPDILLELGQF

SEQ ID NO: 8013 - protein, 19 aa, Artificial sequence
  synthetic peptide
DGDFLTDMPDILLELGQFK

SEQ ID NO: 8014 - protein, 19 aa, Artificial sequence
  synthetic peptide
GDFLTDMPDILLELGQFKK

SEQ ID NO: 8015 - protein, 19 aa, Artificial sequence
  synthetic peptide
DFLTDMPDILLELGQFKKT

SEQ ID NO: 8016 - protein, 19 aa, Artificial sequence
  synthetic peptide
FLTDMPDILLELGQFKKTQ

SEQ ID NO: 8017 - protein, 19 aa, Artificial sequence
  synthetic peptide
LTDMPDILLELGQFKKTQI

SEQ ID NO: 8018 - protein, 19 aa, Artificial sequence
  synthetic peptide
TDMPDILLELGQFKKTQIL

SEQ ID NO: 8019 - protein, 19 aa, Artificial sequence
  synthetic peptide
DMPDILLELGQFKKTQILV

SEQ ID NO: 8020 - protein, 19 aa, Artificial sequence
  synthetic peptide
MPDILLELGQFKKTQILVG

SEQ ID NO: 8021 - protein, 19 aa, Artificial sequence
  synthetic peptide
PDILLELGQFKKTQILVGV

SEQ ID NO: 8022 - protein, 19 aa, Artificial sequence
  synthetic peptide
DILLELGQFKKTQILVGVN

SEQ ID NO: 8023 - protein, 19 aa, Artificial sequence
  synthetic peptide
ILLELGQFKKTQILVGVNK

SEQ ID NO: 8024 - protein, 19 aa, Artificial sequence
  synthetic peptide
LLELGQFKKTQILVGVNKD

SEQ ID NO: 8025 - protein, 19 aa, Artificial sequence
  synthetic peptide
LELGQFKKTQILVGVNKDE

SEQ ID NO: 8026 - protein, 19 aa, Artificial sequence
  synthetic peptide
ELGQFKKTQILVGVNKDEG

SEQ ID NO: 8027 - protein, 19 aa, Artificial sequence
  synthetic peptide
LGQFKKTQILVGVNKDEGT

SEQ ID NO: 8028 - protein, 19 aa, Artificial sequence
  synthetic peptide
GQFKKTQILVGVNKDEGTA

SEQ ID NO: 8029 - protein, 19 aa, Artificial sequence
  synthetic peptide
QFKKTQILVGVNKDEGTAF

SEQ ID NO: 8030 - protein, 19 aa, Artificial sequence
  synthetic peptide
FKKTQILVGVNKDEGTAFL

SEQ ID NO: 8031 - protein, 19 aa, Artificial sequence
  synthetic peptide
KKTQILVGVNKDEGTAFLV

SEQ ID NO: 8032 - protein, 19 aa, Artificial sequence
  synthetic peptide
KTQILVGVNKDEGTAFLVY

SEQ ID NO: 8033 - protein, 19 aa, Artificial sequence
  synthetic peptide
TQILVGVNKDEGTAFLVYG

SEQ ID NO: 8034 - protein, 19 aa, Artificial sequence
  synthetic peptide
QILVGVNKDEGTAFLVYGA

SEQ ID NO: 8035 - protein, 19 aa, Artificial sequence
  synthetic peptide
ILVGVNKDEGTAFLVYGAP

SEQ ID NO: 8036 - protein, 19 aa, Artificial sequence
  synthetic peptide
LVGVNKDEGTAFLVYGAPG

SEQ ID NO: 8037 - protein, 19 aa, Artificial sequence
  synthetic peptide
VGVNKDEGTAFLVYGAPGF

SEQ ID NO: 8038 - protein, 19 aa, Artificial sequence
  synthetic peptide
GVNKDEGTAFLVYGAPGFS

SEQ ID NO: 8039 - protein, 19 aa, Artificial sequence
  synthetic peptide
VNKDEGTAFLVYGAPGFSK

SEQ ID NO: 8040 - protein, 19 aa, Artificial sequence
  synthetic peptide
NKDEGTAFLVYGAPGFSKD

SEQ ID NO: 8041 - protein, 19 aa, Artificial sequence
  synthetic peptide
KDEGTAFLVYGAPGFSKDN

SEQ ID NO: 8042 - protein, 19 aa, Artificial sequence
  synthetic peptide
DEGTAFLVYGAPGFSKDNN

SEQ ID NO: 8043 - protein, 19 aa, Artificial sequence
  synthetic peptide
EGTAFLVYGAPGFSKDNNS

SEQ ID NO: 8044 - protein, 19 aa, Artificial sequence
  synthetic peptide
GTAFLVYGAPGFSKDNNSI

SEQ ID NO: 8045 - protein, 19 aa, Artificial sequence
  synthetic peptide
TAFLVYGAPGFSKDNNSII

SEQ ID NO: 8046 - protein, 19 aa, Artificial sequence
  synthetic peptide
AFLVYGAPGFSKDNNSIIT

SEQ ID NO: 8047 - protein, 19 aa, Artificial sequence
  synthetic peptide
FLVYGAPGFSKDNNSIITR

SEQ ID NO: 8048 - protein, 19 aa, Artificial sequence
  synthetic peptide
LVYGAPGFSKDNNSIITRK

SEQ ID NO: 8049 - protein, 19 aa, Artificial sequence
  synthetic peptide
VYGAPGFSKDNNSIITRKE

SEQ ID NO: 8050 - protein, 19 aa, Artificial sequence
  synthetic peptide
YGAPGFSKDNNSIITRKEF

SEQ ID NO: 8051 - protein, 19 aa, Artificial sequence
  synthetic peptide
GAPGFSKDNNSIITRKEFQ

SEQ ID NO: 8052 - protein, 19 aa, Artificial sequence
  synthetic peptide
APGFSKDNNSIITRKEFQE

SEQ ID NO: 8053 - protein, 19 aa, Artificial sequence
  synthetic peptide
PGFSKDNNSIITRKEFQEG

SEQ ID NO: 8054 - protein, 19 aa, Artificial sequence
  synthetic peptide
GFSKDNNSIITRKEFQEGL

SEQ ID NO: 8055 - protein, 19 aa, Artificial sequence
  synthetic peptide
FSKDNNSIITRKEFQEGLK

SEQ ID NO: 8056 - protein, 19 aa, Artificial sequence
  synthetic peptide
SKDNNSIITRKEFQEGLKI

SEQ ID NO: 8057 - protein, 19 aa, Artificial sequence
  synthetic peptide
KDNNSIITRKEFQEGLKIF

SEQ ID NO: 8058 - protein, 19 aa, Artificial sequence
  synthetic peptide
DNNSIITRKEFQEGLKIFF

SEQ ID NO: 8059 - protein, 19 aa, Artificial sequence
  synthetic peptide
NNSIITRKEFQEGLKIFFP

SEQ ID NO: 8060 - protein, 19 aa, Artificial sequence
  synthetic peptide
NSIITRKEFQEGLKIFFPG

SEQ ID NO: 8061 - protein, 19 aa, Artificial sequence
  synthetic peptide
SIITRKEFQEGLKIFFPGV

SEQ ID NO: 8062 - protein, 19 aa, Artificial sequence
  synthetic peptide
IITRKEFQEGLKIFFPGVS

SEQ ID NO: 8063 - protein, 19 aa, Artificial sequence
  synthetic peptide
ITRKEFQEGLKIFFPGVSE

SEQ ID NO: 8064 - protein, 19 aa, Artificial sequence
  synthetic peptide
TRKEFQEGLKIFFPGVSEF

SEQ ID NO: 8065 - protein, 19 aa, Artificial sequence
  synthetic peptide
RKEFQEGLKIFFPGVSEFG

SEQ ID NO: 8066 - protein, 19 aa, Artificial sequence
  synthetic peptide
KEFQEGLKIFFPGVSEFGK

SEQ ID NO: 8067 - protein, 19 aa, Artificial sequence
  synthetic peptide
EFQEGLKIFFPGVSEFGKE

SEQ ID NO: 8068 - protein, 19 aa, Artificial sequence
  synthetic peptide
FQEGLKIFFPGVSEFGKES

SEQ ID NO: 8069 - protein, 19 aa, Artificial sequence
  synthetic peptide
QEGLKIFFPGVSEFGKESI

SEQ ID NO: 8070 - protein, 19 aa, Artificial sequence
  synthetic peptide
EGLKIFFPGVSEFGKESIL

SEQ ID NO: 8071 - protein, 19 aa, Artificial sequence
  synthetic peptide
GLKIFFPGVSEFGKESILF

SEQ ID NO: 8072 - protein, 19 aa, Artificial sequence
  synthetic peptide
LKIFFPGVSEFGKESILFH

SEQ ID NO: 8073 - protein, 19 aa, Artificial sequence
  synthetic peptide
KIFFPGVSEFGKESILFHY

SEQ ID NO: 8074 - protein, 19 aa, Artificial sequence
  synthetic peptide
IFFPGVSEFGKESILFHYT

SEQ ID NO: 8075 - protein, 19 aa, Artificial sequence
  synthetic peptide
FFPGVSEFGKESILFHYTD

SEQ ID NO: 8076 - protein, 19 aa, Artificial sequence
  synthetic peptide
FPGVSEFGKESILFHYTDW

SEQ ID NO: 8077 - protein, 19 aa, Artificial sequence
  synthetic peptide
PGVSEFGKESILFHYTDWV

SEQ ID NO: 8078 - protein, 19 aa, Artificial sequence
  synthetic peptide
GVSEFGKESILFHYTDWVD

SEQ ID NO: 8079 - protein, 19 aa, Artificial sequence
  synthetic peptide
VSEFGKESILFHYTDWVDD

SEQ ID NO: 8080 - protein, 19 aa, Artificial sequence
  synthetic peptide
SEFGKESILFHYTDWVDDQ

SEQ ID NO: 8081 - protein, 19 aa, Artificial sequence
  synthetic peptide
EFGKESILFHYTDWVDDQR

SEQ ID NO: 8082 - protein, 19 aa, Artificial sequence
  synthetic peptide
FGKESILFHYTDWVDDQRP

SEQ ID NO: 8083 - protein, 19 aa, Artificial sequence
  synthetic peptide
GKESILFHYTDWVDDQRPE

SEQ ID NO: 8084 - protein, 19 aa, Artificial sequence
  synthetic peptide
KESILFHYTDWVDDQRPEN

SEQ ID NO: 8085 - protein, 19 aa, Artificial sequence
  synthetic peptide
ESILFHYTDWVDDQRPENY

SEQ ID NO: 8086 - protein, 19 aa, Artificial sequence
  synthetic peptide
SILFHYTDWVDDQRPENYR

SEQ ID NO: 8087 - protein, 19 aa, Artificial sequence
  synthetic peptide
ILFHYTDWVDDQRPENYRE

SEQ ID NO: 8088 - protein, 19 aa, Artificial sequence
  synthetic peptide
LFHYTDWVDDQRPENYREA

SEQ ID NO: 8089 - protein, 19 aa, Artificial sequence
  synthetic peptide
FHYTDWVDDQRPENYREAL

SEQ ID NO: 8090 - protein, 19 aa, Artificial sequence
  synthetic peptide
HYTDWVDDQRPENYREALG

SEQ ID NO: 8091 - protein, 19 aa, Artificial sequence
  synthetic peptide
YTDWVDDQRPENYREALGD

SEQ ID NO: 8092 - protein, 19 aa, Artificial sequence
  synthetic peptide
TDWVDDQRPENYREALGDV

SEQ ID NO: 8093 - protein, 19 aa, Artificial sequence
  synthetic peptide
DWVDDQRPENYREALGDVV

SEQ ID NO: 8094 - protein, 19 aa, Artificial sequence
  synthetic peptide
WVDDQRPENYREALGDVVG

SEQ ID NO: 8095 - protein, 19 aa, Artificial sequence
  synthetic peptide
VDDQRPENYREALGDVVGD

SEQ ID NO: 8096 - protein, 19 aa, Artificial sequence
  synthetic peptide
DDQRPENYREALGDVVGDY

SEQ ID NO: 8097 - protein, 19 aa, Artificial sequence
  synthetic peptide
DQRPENYREALGDVVGDYN

SEQ ID NO: 8098 - protein, 19 aa, Artificial sequence
  synthetic peptide
QRPENYREALGDVVGDYNF

SEQ ID NO: 8099 - protein, 19 aa, Artificial sequence
  synthetic peptide
RPENYREALGDVVGDYNFI

SEQ ID NO: 8100 - protein, 19 aa, Artificial sequence
  synthetic peptide
PENYREALGDVVGDYNFIC

SEQ ID NO: 8101 - protein, 19 aa, Artificial sequence
  synthetic peptide
ENYREALGDVVGDYNFICP

SEQ ID NO: 8102 - protein, 19 aa, Artificial sequence
  synthetic peptide
NYREALGDVVGDYNFICPA

SEQ ID NO: 8103 - protein, 19 aa, Artificial sequence
  synthetic peptide
YREALGDVVGDYNFICPAL

SEQ ID NO: 8104 - protein, 19 aa, Artificial sequence
  synthetic peptide
REALGDVVGDYNFICPALE

SEQ ID NO: 8105 - protein, 19 aa, Artificial sequence
  synthetic peptide
EALGDVVGDYNFICPALEF

SEQ ID NO: 8106 - protein, 19 aa, Artificial sequence
  synthetic peptide
ALGDVVGDYNFICPALEFT

SEQ ID NO: 8107 - protein, 19 aa, Artificial sequence
  synthetic peptide
LGDVVGDYNFICPALEFTK

SEQ ID NO: 8108 - protein, 19 aa, Artificial sequence
  synthetic peptide
GDVVGDYNFICPALEFTKK

SEQ ID NO: 8109 - protein, 19 aa, Artificial sequence
  synthetic peptide
DVVGDYNFICPALEFTKKF

SEQ ID NO: 8110 - protein, 19 aa, Artificial sequence
  synthetic peptide
VVGDYNFICPALEFTKKFS

SEQ ID NO: 8111 - protein, 19 aa, Artificial sequence
  synthetic peptide
VGDYNFICPALEFTKKFSE

SEQ ID NO: 8112 - protein, 19 aa, Artificial sequence
  synthetic peptide
GDYNFICPALEFTKKFSEW

SEQ ID NO: 8113 - protein, 19 aa, Artificial sequence
  synthetic peptide
DYNFICPALEFTKKFSEWG

SEQ ID NO: 8114 - protein, 19 aa, Artificial sequence
  synthetic peptide
YNFICPALEFTKKFSEWGN

SEQ ID NO: 8115 - protein, 19 aa, Artificial sequence
  synthetic peptide
NFICPALEFTKKFSEWGNN

SEQ ID NO: 8116 - protein, 19 aa, Artificial sequence
  synthetic peptide
FICPALEFTKKFSEWGNNA

SEQ ID NO: 8117 - protein, 19 aa, Artificial sequence
  synthetic peptide
ICPALEFTKKFSEWGNNAF

SEQ ID NO: 8118 - protein, 19 aa, Artificial sequence
  synthetic peptide
CPALEFTKKFSEWGNNAFF

SEQ ID NO: 8119 - protein, 19 aa, Artificial sequence
  synthetic peptide
PALEFTKKFSEWGNNAFFY

SEQ ID NO: 8120 - protein, 19 aa, Artificial sequence
  synthetic peptide
ALEFTKKFSEWGNNAFFYY

SEQ ID NO: 8121 - protein, 19 aa, Artificial sequence
  synthetic peptide
LEFTKKFSEWGNNAFFYYF

SEQ ID NO: 8122 - protein, 19 aa, Artificial sequence
  synthetic peptide
EFTKKFSEWGNNAFFYYFE

SEQ ID NO: 8123 - protein, 19 aa, Artificial sequence
  synthetic peptide
FTKKFSEWGNNAFFYYFEH

SEQ ID NO: 8124 - protein, 19 aa, Artificial sequence
  synthetic peptide
TKKFSEWGNNAFFYYFEHR

SEQ ID NO: 8125 - protein, 19 aa, Artificial sequence
  synthetic peptide
KKFSEWGNNAFFYYFEHRS

SEQ ID NO: 8126 - protein, 19 aa, Artificial sequence
  synthetic peptide
KFSEWGNNAFFYYFEHRSS

SEQ ID NO: 8127 - protein, 19 aa, Artificial sequence
  synthetic peptide
FSEWGNNAFFYYFEHRSSK

SEQ ID NO: 8128 - protein, 19 aa, Artificial sequence
  synthetic peptide
SEWGNNAFFYYFEHRSSKL

SEQ ID NO: 8129 - protein, 19 aa, Artificial sequence
  synthetic peptide
EWGNNAFFYYFEHRSSKLP

SEQ ID NO: 8130 - protein, 19 aa, Artificial sequence
  synthetic peptide
WGNNAFFYYFEHRSSKLPW

SEQ ID NO: 8131 - protein, 19 aa, Artificial sequence
  synthetic peptide
GNNAFFYYFEHRSSKLPWP

SEQ ID NO: 8132 - protein, 19 aa, Artificial sequence
  synthetic peptide
NNAFFYYFEHRSSKLPWPE

SEQ ID NO: 8133 - protein, 19 aa, Artificial sequence
  synthetic peptide
NAFFYYFEHRSSKLPWPEW

SEQ ID NO: 8134 - protein, 19 aa, Artificial sequence
  synthetic peptide
AFFYYFEHRSSKLPWPEWM

SEQ ID NO: 8135 - protein, 19 aa, Artificial sequence
  synthetic peptide
FFYYFEHRSSKLPWPEWMG

SEQ ID NO: 8136 - protein, 19 aa, Artificial sequence
  synthetic peptide
FYYFEHRSSKLPWPEWMGV

SEQ ID NO: 8137 - protein, 19 aa, Artificial sequence
  synthetic peptide
YYFEHRSSKLPWPEWMGVM

SEQ ID NO: 8138 - protein, 19 aa, Artificial sequence
  synthetic peptide
YFEHRSSKLPWPEWMGVMH

SEQ ID NO: 8139 - protein, 19 aa, Artificial sequence
  synthetic peptide
FEHRSSKLPWPEWMGVMHG

SEQ ID NO: 8140 - protein, 19 aa, Artificial sequence
  synthetic peptide
EHRSSKLPWPEWMGVMHGY

SEQ ID NO: 8141 - protein, 19 aa, Artificial sequence
  synthetic peptide
HRSSKLPWPEWMGVMHGYE

SEQ ID NO: 8142 - protein, 19 aa, Artificial sequence
  synthetic peptide
RSSKLPWPEWMGVMHGYEI

SEQ ID NO: 8143 - protein, 19 aa, Artificial sequence
  synthetic peptide
SSKLPWPEWMGVMHGYEIE

SEQ ID NO: 8144 - protein, 19 aa, Artificial sequence
  synthetic peptide
SKLPWPEWMGVMHGYEIEF

SEQ ID NO: 8145 - protein, 19 aa, Artificial sequence
  synthetic peptide
KLPWPEWMGVMHGYEIEFV

SEQ ID NO: 8146 - protein, 19 aa, Artificial sequence
  synthetic peptide
LPWPEWMGVMHGYEIEFVF

SEQ ID NO: 8147 - protein, 19 aa, Artificial sequence
  synthetic peptide
PWPEWMGVMHGYEIEFVFG

SEQ ID NO: 8148 - protein, 19 aa, Artificial sequence
  synthetic peptide
WPEWMGVMHGYEIEFVFGL

SEQ ID NO: 8149 - protein, 19 aa, Artificial sequence
  synthetic peptide
PEWMGVMHGYEIEFVFGLP

SEQ ID NO: 8150 - protein, 19 aa, Artificial sequence
  synthetic peptide
EWMGVMHGYEIEFVFGLPL

SEQ ID NO: 8151 - protein, 19 aa, Artificial sequence
  synthetic peptide
WMGVMHGYEIEFVFGLPLE

SEQ ID NO: 8152 - protein, 19 aa, Artificial sequence
  synthetic peptide
MGVMHGYEIEFVFGLPLER

SEQ ID NO: 8153 - protein, 19 aa, Artificial sequence
  synthetic peptide
GVMHGYEIEFVFGLPLERR

SEQ ID NO: 8154 - protein, 19 aa, Artificial sequence
  synthetic peptide
VMHGYEIEFVFGLPLERRD

SEQ ID NO: 8155 - protein, 19 aa, Artificial sequence
  synthetic peptide
MHGYEIEFVFGLPLERRDN

SEQ ID NO: 8156 - protein, 19 aa, Artificial sequence
  synthetic peptide
HGYEIEFVFGLPLERRDNY

SEQ ID NO: 8157 - protein, 19 aa, Artificial sequence
  synthetic peptide
GYEIEFVFGLPLERRDNYT

SEQ ID NO: 8158 - protein, 19 aa, Artificial sequence
  synthetic peptide
YEIEFVFGLPLERRDNYTK

SEQ ID NO: 8159 - protein, 19 aa, Artificial sequence
  synthetic peptide
EIEFVFGLPLERRDNYTKA

SEQ ID NO: 8160 - protein, 19 aa, Artificial sequence
  synthetic peptide
IEFVFGLPLERRDNYTKAE

SEQ ID NO: 8161 - protein, 19 aa, Artificial sequence
  synthetic peptide
EFVFGLPLERRDNYTKAEE

SEQ ID NO: 8162 - protein, 19 aa, Artificial sequence
  synthetic peptide
FVFGLPLERRDNYTKAEEI

SEQ ID NO: 8163 - protein, 19 aa, Artificial sequence
  synthetic peptide
VFGLPLERRDNYTKAEEIL

SEQ ID NO: 8164 - protein, 19 aa, Artificial sequence
  synthetic peptide
FGLPLERRDNYTKAEEILS

SEQ ID NO: 8165 - protein, 19 aa, Artificial sequence
  synthetic peptide
GLPLERRDNYTKAEEILSR

SEQ ID NO: 8166 - protein, 19 aa, Artificial sequence
  synthetic peptide
LPLERRDNYTKAEEILSRS

SEQ ID NO: 8167 - protein, 19 aa, Artificial sequence
  synthetic peptide
PLERRDNYTKAEEILSRSI

SEQ ID NO: 8168 - protein, 19 aa, Artificial sequence
  synthetic peptide
LERRDNYTKAEEILSRSIV

SEQ ID NO: 8169 - protein, 19 aa, Artificial sequence
  synthetic peptide
ERRDNYTKAEEILSRSIVK

SEQ ID NO: 8170 - protein, 19 aa, Artificial sequence
  synthetic peptide
RRDNYTKAEEILSRSIVKR

SEQ ID NO: 8171 - protein, 19 aa, Artificial sequence
  synthetic peptide
RDNYTKAEEILSRSIVKRW

SEQ ID NO: 8172 - protein, 19 aa, Artificial sequence
  synthetic peptide
DNYTKAEEILSRSIVKRWA

SEQ ID NO: 8173 - protein, 19 aa, Artificial sequence
  synthetic peptide
NYTKAEEILSRSIVKRWAN

SEQ ID NO: 8174 - protein, 19 aa, Artificial sequence
  synthetic peptide
YTKAEEILSRSIVKRWANF

SEQ ID NO: 8175 - protein, 19 aa, Artificial sequence
  synthetic peptide
TKAEEILSRSIVKRWANFA

SEQ ID NO: 8176 - protein, 19 aa, Artificial sequence
  synthetic peptide
KAEEILSRSIVKRWANFAK

SEQ ID NO: 8177 - protein, 19 aa, Artificial sequence
  synthetic peptide
AEEILSRSIVKRWANFAKY

SEQ ID NO: 8178 - protein, 19 aa, Artificial sequence
  synthetic peptide
EEILSRSIVKRWANFAKYG

SEQ ID NO: 8179 - protein, 19 aa, Artificial sequence
  synthetic peptide
EILSRSIVKRWANFAKYGN

SEQ ID NO: 8180 - protein, 19 aa, Artificial sequence
  synthetic peptide
ILSRSIVKRWANFAKYGNP

SEQ ID NO: 8181 - protein, 19 aa, Artificial sequence
  synthetic peptide
LSRSIVKRWANFAKYGNPN

SEQ ID NO: 8182 - protein, 19 aa, Artificial sequence
  synthetic peptide
SRSIVKRWANFAKYGNPNE

SEQ ID NO: 8183 - protein, 19 aa, Artificial sequence
  synthetic peptide
RSIVKRWANFAKYGNPNET

SEQ ID NO: 8184 - protein, 19 aa, Artificial sequence
  synthetic peptide
SIVKRWANFAKYGNPNETQ

SEQ ID NO: 8185 - protein, 19 aa, Artificial sequence
  synthetic peptide
IVKRWANFAKYGNPNETQN

SEQ ID NO: 8186 - protein, 19 aa, Artificial sequence
  synthetic peptide
VKRWANFAKYGNPNETQNN

SEQ ID NO: 8187 - protein, 19 aa, Artificial sequence
  synthetic peptide
KRWANFAKYGNPNETQNNS

SEQ ID NO: 8188 - protein, 19 aa, Artificial sequence
  synthetic peptide
RWANFAKYGNPNETQNNST

SEQ ID NO: 8189 - protein, 19 aa, Artificial sequence
  synthetic peptide
WANFAKYGNPNETQNNSTS

SEQ ID NO: 8190 - protein, 19 aa, Artificial sequence
  synthetic peptide
ANFAKYGNPNETQNNSTSW

SEQ ID NO: 8191 - protein, 19 aa, Artificial sequence
  synthetic peptide
NFAKYGNPNETQNNSTSWP

SEQ ID NO: 8192 - protein, 19 aa, Artificial sequence
  synthetic peptide
FAKYGNPNETQNNSTSWPV

SEQ ID NO: 8193 - protein, 19 aa, Artificial sequence
  synthetic peptide
AKYGNPNETQNNSTSWPVF

SEQ ID NO: 8194 - protein, 19 aa, Artificial sequence
  synthetic peptide
KYGNPNETQNNSTSWPVFK

SEQ ID NO: 8195 - protein, 19 aa, Artificial sequence
  synthetic peptide
YGNPNETQNNSTSWPVFKS

SEQ ID NO: 8196 - protein, 19 aa, Artificial sequence
  synthetic peptide
GNPNETQNNSTSWPVFKST

SEQ ID NO: 8197 - protein, 19 aa, Artificial sequence
  synthetic peptide
NPNETQNNSTSWPVFKSTE

SEQ ID NO: 8198 - protein, 19 aa, Artificial sequence
  synthetic peptide
PNETQNNSTSWPVFKSTEQ

SEQ ID NO: 8199 - protein, 19 aa, Artificial sequence
  synthetic peptide
NETQNNSTSWPVFKSTEQK

SEQ ID NO: 8200 - protein, 19 aa, Artificial sequence
  synthetic peptide
ETQNNSTSWPVFKSTEQKY

SEQ ID NO: 8201 - protein, 19 aa, Artificial sequence
  synthetic peptide
TQNNSTSWPVFKSTEQKYL

SEQ ID NO: 8202 - protein, 19 aa, Artificial sequence
  synthetic peptide
QNNSTSWPVFKSTEQKYLT

SEQ ID NO: 8203 - protein, 19 aa, Artificial sequence
  synthetic peptide
NNSTSWPVFKSTEQKYLTL

SEQ ID NO: 8204 - protein, 19 aa, Artificial sequence
  synthetic peptide
NSTSWPVFKSTEQKYLTLN

SEQ ID NO: 8205 - protein, 19 aa, Artificial sequence
  synthetic peptide
STSWPVFKSTEQKYLTLNT

SEQ ID NO: 8206 - protein, 19 aa, Artificial sequence
  synthetic peptide
TSWPVFKSTEQKYLTLNTE

SEQ ID NO: 8207 - protein, 19 aa, Artificial sequence
  synthetic peptide
SWPVFKSTEQKYLTLNTES

SEQ ID NO: 8208 - protein, 19 aa, Artificial sequence
  synthetic peptide
WPVFKSTEQKYLTLNTEST

SEQ ID NO: 8209 - protein, 19 aa, Artificial sequence
  synthetic peptide
PVFKSTEQKYLTLNTESTR

SEQ ID NO: 8210 - protein, 19 aa, Artificial sequence
  synthetic peptide
VFKSTEQKYLTLNTESTRI

SEQ ID NO: 8211 - protein, 19 aa, Artificial sequence
  synthetic peptide
FKSTEQKYLTLNTESTRIM

SEQ ID NO: 8212 - protein, 19 aa, Artificial sequence
  synthetic peptide
KSTEQKYLTLNTESTRIMT

SEQ ID NO: 8213 - protein, 19 aa, Artificial sequence
  synthetic peptide
STEQKYLTLNTESTRIMTK

SEQ ID NO: 8214 - protein, 19 aa, Artificial sequence
  synthetic peptide
TEQKYLTLNTESTRIMTKL

SEQ ID NO: 8215 - protein, 19 aa, Artificial sequence
  synthetic peptide
EQKYLTLNTESTRIMTKLR

SEQ ID NO: 8216 - protein, 19 aa, Artificial sequence
  synthetic peptide
QKYLTLNTESTRIMTKLRA

SEQ ID NO: 8217 - protein, 19 aa, Artificial sequence
  synthetic peptide
KYLTLNTESTRIMTKLRAQ

SEQ ID NO: 8218 - protein, 19 aa, Artificial sequence
  synthetic peptide
YLTLNTESTRIMTKLRAQQ

SEQ ID NO: 8219 - protein, 19 aa, Artificial sequence
  synthetic peptide
LTLNTESTRIMTKLRAQQC

SEQ ID NO: 8220 - protein, 19 aa, Artificial sequence
  synthetic peptide
TLNTESTRIMTKLRAQQCR

SEQ ID NO: 8221 - protein, 19 aa, Artificial sequence
  synthetic peptide
LNTESTRIMTKLRAQQCRF

SEQ ID NO: 8222 - protein, 19 aa, Artificial sequence
  synthetic peptide
NTESTRIMTKLRAQQCRFW

SEQ ID NO: 8223 - protein, 19 aa, Artificial sequence
  synthetic peptide
TESTRIMTKLRAQQCRFWT

SEQ ID NO: 8224 - protein, 19 aa, Artificial sequence
  synthetic peptide
ESTRIMTKLRAQQCRFWTS

SEQ ID NO: 8225 - protein, 19 aa, Artificial sequence
  synthetic peptide
STRIMTKLRAQQCRFWTSF

SEQ ID NO: 8226 - protein, 19 aa, Artificial sequence
  synthetic peptide
TRIMTKLRAQQCRFWTSFF

SEQ ID NO: 8227 - protein, 19 aa, Artificial sequence
  synthetic peptide
RIMTKLRAQQCRFWTSFFP

SEQ ID NO: 8228 - protein, 19 aa, Artificial sequence
  synthetic peptide
IMTKLRAQQCRFWTSFFPK

SEQ ID NO: 8229 - protein, 19 aa, Artificial sequence
  synthetic peptide
MTKLRAQQCRFWTSFFPKV

SEQ ID NO: 8230 - protein, 19 aa, Artificial sequence
  synthetic peptide
TKLRAQQCRFWTSFFPKVL

SEQ ID NO: 8231 - protein, 19 aa, Artificial sequence
  synthetic peptide
KLRAQQCRFWTSFFPKVLE

SEQ ID NO: 8232 - protein, 19 aa, Artificial sequence
  synthetic peptide
LRAQQCRFWTSFFPKVLEM

SEQ ID NO: 8233 - protein, 19 aa, Artificial sequence
  synthetic peptide
RAQQCRFWTSFFPKVLEMT

SEQ ID NO: 8234 - protein, 19 aa, Artificial sequence
  synthetic peptide
AQQCRFWTSFFPKVLEMTG

SEQ ID NO: 8235 - protein, 19 aa, Artificial sequence
  synthetic peptide
QQCRFWTSFFPKVLEMTGN

SEQ ID NO: 8236 - protein, 19 aa, Artificial sequence
  synthetic peptide
QCRFWTSFFPKVLEMTGNI

SEQ ID NO: 8237 - protein, 19 aa, Artificial sequence
  synthetic peptide
CRFWTSFFPKVLEMTGNID

SEQ ID NO: 8238 - protein, 19 aa, Artificial sequence
  synthetic peptide
RFWTSFFPKVLEMTGNIDE

SEQ ID NO: 8239 - protein, 19 aa, Artificial sequence
  synthetic peptide
FWTSFFPKVLEMTGNIDEA

SEQ ID NO: 8240 - protein, 19 aa, Artificial sequence
  synthetic peptide
WTSFFPKVLEMTGNIDEAE

SEQ ID NO: 8241 - protein, 19 aa, Artificial sequence
  synthetic peptide
TSFFPKVLEMTGNIDEAEW

SEQ ID NO: 8242 - protein, 19 aa, Artificial sequence
  synthetic peptide
SFFPKVLEMTGNIDEAEWE

SEQ ID NO: 8243 - protein, 19 aa, Artificial sequence
  synthetic peptide
FFPKVLEMTGNIDEAEWEW

SEQ ID NO: 8244 - protein, 19 aa, Artificial sequence
  synthetic peptide
FPKVLEMTGNIDEAEWEWK

SEQ ID NO: 8245 - protein, 19 aa, Artificial sequence
  synthetic peptide
PKVLEMTGNIDEAEWEWKA

SEQ ID NO: 8246 - protein, 19 aa, Artificial sequence
  synthetic peptide
KVLEMTGNIDEAEWEWKAG

SEQ ID NO: 8247 - protein, 19 aa, Artificial sequence
  synthetic peptide
VLEMTGNIDEAEWEWKAGF

SEQ ID NO: 8248 - protein, 19 aa, Artificial sequence
  synthetic peptide
LEMTGNIDEAEWEWKAGFH

SEQ ID NO: 8249 - protein, 19 aa, Artificial sequence
  synthetic peptide
EMTGNIDEAEWEWKAGFHR

SEQ ID NO: 8250 - protein, 19 aa, Artificial sequence
  synthetic peptide
MTGNIDEAEWEWKAGFHRW

SEQ ID NO: 8251 - protein, 19 aa, Artificial sequence
  synthetic peptide
TGNIDEAEWEWKAGFHRWN

SEQ ID NO: 8252 - protein, 19 aa, Artificial sequence
  synthetic peptide
GNIDEAEWEWKAGFHRWNN

SEQ ID NO: 8253 - protein, 19 aa, Artificial sequence
  synthetic peptide
NIDEAEWEWKAGFHRWNNY

SEQ ID NO: 8254 - protein, 19 aa, Artificial sequence
  synthetic peptide
IDEAEWEWKAGFHRWNNYM

SEQ ID NO: 8255 - protein, 19 aa, Artificial sequence
  synthetic peptide
DEAEWEWKAGFHRWNNYMM

SEQ ID NO: 8256 - protein, 19 aa, Artificial sequence
  synthetic peptide
EAEWEWKAGFHRWNNYMMD

SEQ ID NO: 8257 - protein, 19 aa, Artificial sequence
  synthetic peptide
AEWEWKAGFHRWNNYMMDW

SEQ ID NO: 8258 - protein, 19 aa, Artificial sequence
  synthetic peptide
EWEWKAGFHRWNNYMMDWK

SEQ ID NO: 8259 - protein, 19 aa, Artificial sequence
  synthetic peptide
WEWKAGFHRWNNYMMDWKN

SEQ ID NO: 8260 - protein, 19 aa, Artificial sequence
  synthetic peptide
EWKAGFHRWNNYMMDWKNQ

SEQ ID NO: 8261 - protein, 19 aa, Artificial sequence
  synthetic peptide
WKAGFHRWNNYMMDWKNQF

SEQ ID NO: 8262 - protein, 19 aa, Artificial sequence
  synthetic peptide
KAGFHRWNNYMMDWKNQFN

SEQ ID NO: 8263 - protein, 19 aa, Artificial sequence
  synthetic peptide
AGFHRWNNYMMDWKNQFND

SEQ ID NO: 8264 - protein, 19 aa, Artificial sequence
  synthetic peptide
GFHRWNNYMMDWKNQFNDY

SEQ ID NO: 8265 - protein, 19 aa, Artificial sequence
  synthetic peptide
FHRWNNYMMDWKNQFNDYT

SEQ ID NO: 8266 - protein, 19 aa, Artificial sequence
  synthetic peptide
HRWNNYMMDWKNQFNDYTS

SEQ ID NO: 8267 - protein, 19 aa, Artificial sequence
  synthetic peptide
RWNNYMMDWKNQFNDYTSK

SEQ ID NO: 8268 - protein, 19 aa, Artificial sequence
  synthetic peptide
WNNYMMDWKNQFNDYTSKK

SEQ ID NO: 8269 - protein, 19 aa, Artificial sequence
  synthetic peptide
NNYMMDWKNQFNDYTSKKE

SEQ ID NO: 8270 - protein, 19 aa, Artificial sequence
  synthetic peptide
NYMMDWKNQFNDYTSKKES

SEQ ID NO: 8271 - protein, 19 aa, Artificial sequence
  synthetic peptide
YMMDWKNQFNDYTSKKESC

SEQ ID NO: 8272 - protein, 19 aa, Artificial sequence
  synthetic peptide
MMDWKNQFNDYTSKKESCV

SEQ ID NO: 8273 - protein, 19 aa, Artificial sequence
  synthetic peptide
MDWKNQFNDYTSKKESCVG

SEQ ID NO: 8274 - protein, 19 aa, Artificial sequence
  synthetic peptide
DWKNQFNDYTSKKESCVGL

SEQ ID NO: 8275 - protein, 20 aa, Artificial sequence
  synthetic peptide
MHSKVTIICIRFLFWFLLLC

SEQ ID NO: 8276 - protein, 20 aa, Artificial sequence
  synthetic peptide
HSKVTIICIRFLFWFLLLCM

SEQ ID NO: 8277 - protein, 20 aa, Artificial sequence
  synthetic peptide
SKVTIICIRFLFWFLLLCML

SEQ ID NO: 8278 - protein, 20 aa, Artificial sequence
  synthetic peptide
KVTIICIRFLFWFLLLCMLI

SEQ ID NO: 8279 - protein, 20 aa, Artificial sequence
  synthetic peptide
VTIICIRFLFWFLLLCMLIG

SEQ ID NO: 8280 - protein, 20 aa, Artificial sequence
  synthetic peptide
TIICIRFLFWFLLLCMLIGK

SEQ ID NO: 8281 - protein, 20 aa, Artificial sequence
  synthetic peptide
IICIRFLFWFLLLCMLIGKS

SEQ ID NO: 8282 - protein, 20 aa, Artificial sequence
  synthetic peptide
ICIRFLFWFLLLCMLIGKSH

SEQ ID NO: 8283 - protein, 20 aa, Artificial sequence
  synthetic peptide
CIRFLFWFLLLCMLIGKSHT

SEQ ID NO: 8284 - protein, 20 aa, Artificial sequence
  synthetic peptide
IRFLFWFLLLCMLIGKSHTE

SEQ ID NO: 8285 - protein, 20 aa, Artificial sequence
  synthetic peptide
RFLFWFLLLCMLIGKSHTED

SEQ ID NO: 8286 - protein, 20 aa, Artificial sequence
  synthetic peptide
FLFWFLLLCMLIGKSHTEDD

SEQ ID NO: 8287 - protein, 20 aa, Artificial sequence
  synthetic peptide
LFWFLLLCMLIGKSHTEDDI

SEQ ID NO: 8288 - protein, 20 aa, Artificial sequence
  synthetic peptide
FWFLLLCMLIGKSHTEDDII

SEQ ID NO: 8289 - protein, 20 aa, Artificial sequence
  synthetic peptide
WFLLLCMLIGKSHTEDDIII

SEQ ID NO: 8290 - protein, 20 aa, Artificial sequence
  synthetic peptide
FLLLCMLIGKSHTEDDIIIA

SEQ ID NO: 8291 - protein, 20 aa, Artificial sequence
  synthetic peptide
LLLCMLIGKSHTEDDIIIAT

SEQ ID NO: 8292 - protein, 20 aa, Artificial sequence
  synthetic peptide
LLCMLIGKSHTEDDIIIATK

SEQ ID NO: 8293 - protein, 20 aa, Artificial sequence
  synthetic peptide
LCMLIGKSHTEDDIIIATKN

SEQ ID NO: 8294 - protein, 20 aa, Artificial sequence
  synthetic peptide
CMLIGKSHTEDDIIIATKNG

SEQ ID NO: 8295 - protein, 20 aa, Artificial sequence
  synthetic peptide
MLIGKSHTEDDIIIATKNGK

SEQ ID NO: 8296 - protein, 20 aa, Artificial sequence
  synthetic peptide
LIGKSHTEDDIIIATKNGKV

SEQ ID NO: 8297 - protein, 20 aa, Artificial sequence
  synthetic peptide
IGKSHTEDDIIIATKNGKVR

SEQ ID NO: 8298 - protein, 20 aa, Artificial sequence
  synthetic peptide
GKSHTEDDIIIATKNGKVRG

SEQ ID NO: 8299 - protein, 20 aa, Artificial sequence
  synthetic peptide
KSHTEDDIIIATKNGKVRGM

SEQ ID NO: 8300 - protein, 20 aa, Artificial sequence
  synthetic peptide
SHTEDDIIIATKNGKVRGMN

SEQ ID NO: 8301 - protein, 20 aa, Artificial sequence
  synthetic peptide
HTEDDIIIATKNGKVRGMNL

SEQ ID NO: 8302 - protein, 20 aa, Artificial sequence
  synthetic peptide
TEDDIIIATKNGKVRGMNLT

SEQ ID NO: 8303 - protein, 20 aa, Artificial sequence
  synthetic peptide
EDDIIIATKNGKVRGMNLTV

SEQ ID NO: 8304 - protein, 20 aa, Artificial sequence
  synthetic peptide
DDIIIATKNGKVRGMNLTVF

SEQ ID NO: 8305 - protein, 20 aa, Artificial sequence
  synthetic peptide
DIIIATKNGKVRGMNLTVFG

SEQ ID NO: 8306 - protein, 20 aa, Artificial sequence
  synthetic peptide
IIIATKNGKVRGMNLTVFGG

SEQ ID NO: 8307 - protein, 20 aa, Artificial sequence
  synthetic peptide
IIATKNGKVRGMNLTVFGGT

SEQ ID NO: 8308 - protein, 20 aa, Artificial sequence
  synthetic peptide
IATKNGKVRGMNLTVFGGTV

SEQ ID NO: 8309 - protein, 20 aa, Artificial sequence
  synthetic peptide
ATKNGKVRGMNLTVFGGTVT

SEQ ID NO: 8310 - protein, 20 aa, Artificial sequence
  synthetic peptide
TKNGKVRGMNLTVFGGTVTA

SEQ ID NO: 8311 - protein, 20 aa, Artificial sequence
  synthetic peptide
KNGKVRGMNLTVFGGTVTAF

SEQ ID NO: 8312 - protein, 20 aa, Artificial sequence
  synthetic peptide
NGKVRGMNLTVFGGTVTAFL

SEQ ID NO: 8313 - protein, 20 aa, Artificial sequence
  synthetic peptide
GKVRGMNLTVFGGTVTAFLG

SEQ ID NO: 8314 - protein, 20 aa, Artificial sequence
  synthetic peptide
KVRGMNLTVFGGTVTAFLGI

SEQ ID NO: 8315 - protein, 20 aa, Artificial sequence
  synthetic peptide
VRGMNLTVFGGTVTAFLGIP

SEQ ID NO: 8316 - protein, 20 aa, Artificial sequence
  synthetic peptide
RGMNLTVFGGTVTAFLGIPY

SEQ ID NO: 8317 - protein, 20 aa, Artificial sequence
  synthetic peptide
GMNLTVFGGTVTAFLGIPYA

SEQ ID NO: 8318 - protein, 20 aa, Artificial sequence
  synthetic peptide
MNLTVFGGTVTAFLGIPYAQ

SEQ ID NO: 8319 - protein, 20 aa, Artificial sequence
  synthetic peptide
NLTVFGGTVTAFLGIPYAQP

SEQ ID NO: 8320 - protein, 20 aa, Artificial sequence
  synthetic peptide
LTVFGGTVTAFLGIPYAQPP

SEQ ID NO: 8321 - protein, 20 aa, Artificial sequence
  synthetic peptide
TVFGGTVTAFLGIPYAQPPL

SEQ ID NO: 8322 - protein, 20 aa, Artificial sequence
  synthetic peptide
VFGGTVTAFLGIPYAQPPLG

SEQ ID NO: 8323 - protein, 20 aa, Artificial sequence
  synthetic peptide
FGGTVTAFLGIPYAQPPLGR

SEQ ID NO: 8324 - protein, 20 aa, Artificial sequence
  synthetic peptide
GGTVTAFLGIPYAQPPLGRL

SEQ ID NO: 8325 - protein, 20 aa, Artificial sequence
  synthetic peptide
GTVTAFLGIPYAQPPLGRLR

SEQ ID NO: 8326 - protein, 20 aa, Artificial sequence
  synthetic peptide
TVTAFLGIPYAQPPLGRLRF

SEQ ID NO: 8327 - protein, 20 aa, Artificial sequence
  synthetic peptide
VTAFLGIPYAQPPLGRLRFK

SEQ ID NO: 8328 - protein, 20 aa, Artificial sequence
  synthetic peptide
TAFLGIPYAQPPLGRLRFKK

SEQ ID NO: 8329 - protein, 20 aa, Artificial sequence
  synthetic peptide
AFLGIPYAQPPLGRLRFKKP

SEQ ID NO: 8330 - protein, 20 aa, Artificial sequence
  synthetic peptide
FLGIPYAQPPLGRLRFKKPQ

SEQ ID NO: 8331 - protein, 20 aa, Artificial sequence
  synthetic peptide
LGIPYAQPPLGRLRFKKPQS

SEQ ID NO: 8332 - protein, 20 aa, Artificial sequence
  synthetic peptide
GIPYAQPPLGRLRFKKPQSL

SEQ ID NO: 8333 - protein, 20 aa, Artificial sequence
  synthetic peptide
IPYAQPPLGRLRFKKPQSLT

SEQ ID NO: 8334 - protein, 20 aa, Artificial sequence
  synthetic peptide
PYAQPPLGRLRFKKPQSLTK

SEQ ID NO: 8335 - protein, 20 aa, Artificial sequence
  synthetic peptide
YAQPPLGRLRFKKPQSLTKW

SEQ ID NO: 8336 - protein, 20 aa, Artificial sequence
  synthetic peptide
AQPPLGRLRFKKPQSLTKWS

SEQ ID NO: 8337 - protein, 20 aa, Artificial sequence
  synthetic peptide
QPPLGRLRFKKPQSLTKWSD

SEQ ID NO: 8338 - protein, 20 aa, Artificial sequence
  synthetic peptide
PPLGRLRFKKPQSLTKWSDI

SEQ ID NO: 8339 - protein, 20 aa, Artificial sequence
  synthetic peptide
PLGRLRFKKPQSLTKWSDIW

SEQ ID NO: 8340 - protein, 20 aa, Artificial sequence
  synthetic peptide
LGRLRFKKPQSLTKWSDIWN

SEQ ID NO: 8341 - protein, 20 aa, Artificial sequence
  synthetic peptide
GRLRFKKPQSLTKWSDIWNA

SEQ ID NO: 8342 - protein, 20 aa, Artificial sequence
  synthetic peptide
RLRFKKPQSLTKWSDIWNAT

SEQ ID NO: 8343 - protein, 20 aa, Artificial sequence
  synthetic peptide
LRFKKPQSLTKWSDIWNATK

SEQ ID NO: 8344 - protein, 20 aa, Artificial sequence
  synthetic peptide
RFKKPQSLTKWSDIWNATKY

SEQ ID NO: 8345 - protein, 20 aa, Artificial sequence
  synthetic peptide
FKKPQSLTKWSDIWNATKYA

SEQ ID NO: 8346 - protein, 20 aa, Artificial sequence
  synthetic peptide
KKPQSLTKWSDIWNATKYAN

SEQ ID NO: 8347 - protein, 20 aa, Artificial sequence
  synthetic peptide
KPQSLTKWSDIWNATKYANS

SEQ ID NO: 8348 - protein, 20 aa, Artificial sequence
  synthetic peptide
PQSLTKWSDIWNATKYANSC

SEQ ID NO: 8349 - protein, 20 aa, Artificial sequence
  synthetic peptide
QSLTKWSDIWNATKYANSCC

SEQ ID NO: 8350 - protein, 20 aa, Artificial sequence
  synthetic peptide
SLTKWSDIWNATKYANSCCQ

SEQ ID NO: 8351 - protein, 20 aa, Artificial sequence
  synthetic peptide
LTKWSDIWNATKYANSCCQN

SEQ ID NO: 8352 - protein, 20 aa, Artificial sequence
  synthetic peptide
TKWSDIWNATKYANSCCQNI

SEQ ID NO: 8353 - protein, 20 aa, Artificial sequence
  synthetic peptide
KWSDIWNATKYANSCCQNID

SEQ ID NO: 8354 - protein, 20 aa, Artificial sequence
  synthetic peptide
WSDIWNATKYANSCCQNIDQ

SEQ ID NO: 8355 - protein, 20 aa, Artificial sequence
  synthetic peptide
SDIWNATKYANSCCQNIDQS

SEQ ID NO: 8356 - protein, 20 aa, Artificial sequence
  synthetic peptide
DIWNATKYANSCCQNIDQSF

SEQ ID NO: 8357 - protein, 20 aa, Artificial sequence
  synthetic peptide
IWNATKYANSCCQNIDQSFP

SEQ ID NO: 8358 - protein, 20 aa, Artificial sequence
  synthetic peptide
WNATKYANSCCQNIDQSFPG

SEQ ID NO: 8359 - protein, 20 aa, Artificial sequence
  synthetic peptide
NATKYANSCCQNIDQSFPGF

SEQ ID NO: 8360 - protein, 20 aa, Artificial sequence
  synthetic peptide
ATKYANSCCQNIDQSFPGFH

SEQ ID NO: 8361 - protein, 20 aa, Artificial sequence
  synthetic peptide
TKYANSCCQNIDQSFPGFHG

SEQ ID NO: 8362 - protein, 20 aa, Artificial sequence
  synthetic peptide
KYANSCCQNIDQSFPGFHGS

SEQ ID NO: 8363 - protein, 20 aa, Artificial sequence
  synthetic peptide
YANSCCQNIDQSFPGFHGSE

SEQ ID NO: 8364 - protein, 20 aa, Artificial sequence
  synthetic peptide
ANSCCQNIDQSFPGFHGSEM

SEQ ID NO: 8365 - protein, 20 aa, Artificial sequence
  synthetic peptide
NSCCQNIDQSFPGFHGSEMW

SEQ ID NO: 8366 - protein, 20 aa, Artificial sequence
  synthetic peptide
SCCQNIDQSFPGFHGSEMWN

SEQ ID NO: 8367 - protein, 20 aa, Artificial sequence
  synthetic peptide
CCQNIDQSFPGFHGSEMWNP

SEQ ID NO: 8368 - protein, 20 aa, Artificial sequence
  synthetic peptide
CQNIDQSFPGFHGSEMWNPN

SEQ ID NO: 8369 - protein, 20 aa, Artificial sequence
  synthetic peptide
QNIDQSFPGFHGSEMWNPNT

SEQ ID NO: 8370 - protein, 20 aa, Artificial sequence
  synthetic peptide
NIDQSFPGFHGSEMWNPNTD

SEQ ID NO: 8371 - protein, 20 aa, Artificial sequence
  synthetic peptide
IDQSFPGFHGSEMWNPNTDL

SEQ ID NO: 8372 - protein, 20 aa, Artificial sequence
  synthetic peptide
DQSFPGFHGSEMWNPNTDLS

SEQ ID NO: 8373 - protein, 20 aa, Artificial sequence
  synthetic peptide
QSFPGFHGSEMWNPNTDLSE

SEQ ID NO: 8374 - protein, 20 aa, Artificial sequence
  synthetic peptide
SFPGFHGSEMWNPNTDLSED

SEQ ID NO: 8375 - protein, 20 aa, Artificial sequence
  synthetic peptide
FPGFHGSEMWNPNTDLSEDC

SEQ ID NO: 8376 - protein, 20 aa, Artificial sequence
  synthetic peptide
PGFHGSEMWNPNTDLSEDCL

SEQ ID NO: 8377 - protein, 20 aa, Artificial sequence
  synthetic peptide
GFHGSEMWNPNTDLSEDCLY

SEQ ID NO: 8378 - protein, 20 aa, Artificial sequence
  synthetic peptide
FHGSEMWNPNTDLSEDCLYL

SEQ ID NO: 8379 - protein, 20 aa, Artificial sequence
  synthetic peptide
HGSEMWNPNTDLSEDCLYLN

SEQ ID NO: 8380 - protein, 20 aa, Artificial sequence
  synthetic peptide
GSEMWNPNTDLSEDCLYLNV

SEQ ID NO: 8381 - protein, 20 aa, Artificial sequence
  synthetic peptide
SEMWNPNTDLSEDCLYLNVW

SEQ ID NO: 8382 - protein, 20 aa, Artificial sequence
  synthetic peptide
EMWNPNTDLSEDCLYLNVWI

SEQ ID NO: 8383 - protein, 20 aa, Artificial sequence
  synthetic peptide
MWNPNTDLSEDCLYLNVWIP

SEQ ID NO: 8384 - protein, 20 aa, Artificial sequence
  synthetic peptide
WNPNTDLSEDCLYLNVWIPA

SEQ ID NO: 8385 - protein, 20 aa, Artificial sequence
  synthetic peptide
NPNTDLSEDCLYLNVWIPAP

SEQ ID NO: 8386 - protein, 20 aa, Artificial sequence
  synthetic peptide
PNTDLSEDCLYLNVWIPAPK

SEQ ID NO: 8387 - protein, 20 aa, Artificial sequence
  synthetic peptide
NTDLSEDCLYLNVWIPAPKP

SEQ ID NO: 8388 - protein, 20 aa, Artificial sequence
  synthetic peptide
TDLSEDCLYLNVWIPAPKPK

SEQ ID NO: 8389 - protein, 20 aa, Artificial sequence
  synthetic peptide
DLSEDCLYLNVWIPAPKPKN

SEQ ID NO: 8390 - protein, 20 aa, Artificial sequence
  synthetic peptide
LSEDCLYLNVWIPAPKPKNA

SEQ ID NO: 8391 - protein, 20 aa, Artificial sequence
  synthetic peptide
SEDCLYLNVWIPAPKPKNAT

SEQ ID NO: 8392 - protein, 20 aa, Artificial sequence
  synthetic peptide
EDCLYLNVWIPAPKPKNATV

SEQ ID NO: 8393 - protein, 20 aa, Artificial sequence
  synthetic peptide
DCLYLNVWIPAPKPKNATVL

SEQ ID NO: 8394 - protein, 20 aa, Artificial sequence
  synthetic peptide
CLYLNVWIPAPKPKNATVLI

SEQ ID NO: 8395 - protein, 20 aa, Artificial sequence
  synthetic peptide
LYLNVWIPAPKPKNATVLIW

SEQ ID NO: 8396 - protein, 20 aa, Artificial sequence
  synthetic peptide
YLNVWIPAPKPKNATVLIWI

SEQ ID NO: 8397 - protein, 20 aa, Artificial sequence
  synthetic peptide
LNVWIPAPKPKNATVLIWIY

SEQ ID NO: 8398 - protein, 20 aa, Artificial sequence
  synthetic peptide
NVWIPAPKPKNATVLIWIYG

SEQ ID NO: 8399 - protein, 20 aa, Artificial sequence
  synthetic peptide
VWIPAPKPKNATVLIWIYGG

SEQ ID NO: 8400 - protein, 20 aa, Artificial sequence
  synthetic peptide
WIPAPKPKNATVLIWIYGGG

SEQ ID NO: 8401 - protein, 20 aa, Artificial sequence
  synthetic peptide
IPAPKPKNATVLIWIYGGGF

SEQ ID NO: 8402 - protein, 20 aa, Artificial sequence
  synthetic peptide
PAPKPKNATVLIWIYGGGFQ

SEQ ID NO: 8403 - protein, 20 aa, Artificial sequence
  synthetic peptide
APKPKNATVLIWIYGGGFQT

SEQ ID NO: 8404 - protein, 20 aa, Artificial sequence
  synthetic peptide
PKPKNATVLIWIYGGGFQTG

SEQ ID NO: 8405 - protein, 20 aa, Artificial sequence
  synthetic peptide
KPKNATVLIWIYGGGFQTGT

SEQ ID NO: 8406 - protein, 20 aa, Artificial sequence
  synthetic peptide
PKNATVLIWIYGGGFQTGTS

SEQ ID NO: 8407 - protein, 20 aa, Artificial sequence
  synthetic peptide
KNATVLIWIYGGGFQTGTSS

SEQ ID NO: 8408 - protein, 20 aa, Artificial sequence
  synthetic peptide
NATVLIWIYGGGFQTGTSSL

SEQ ID NO: 8409 - protein, 20 aa, Artificial sequence
  synthetic peptide
ATVLIWIYGGGFQTGTSSLH

SEQ ID NO: 8410 - protein, 20 aa, Artificial sequence
  synthetic peptide
TVLIWIYGGGFQTGTSSLHV

SEQ ID NO: 8411 - protein, 20 aa, Artificial sequence
  synthetic peptide
VLIWIYGGGFQTGTSSLHVY

SEQ ID NO: 8412 - protein, 20 aa, Artificial sequence
  synthetic peptide
LIWIYGGGFQTGTSSLHVYD

SEQ ID NO: 8413 - protein, 20 aa, Artificial sequence
  synthetic peptide
IWIYGGGFQTGTSSLHVYDG

SEQ ID NO: 8414 - protein, 20 aa, Artificial sequence
  synthetic peptide
WIYGGGFQTGTSSLHVYDGK

SEQ ID NO: 8415 - protein, 20 aa, Artificial sequence
  synthetic peptide
IYGGGFQTGTSSLHVYDGKF

SEQ ID NO: 8416 - protein, 20 aa, Artificial sequence
  synthetic peptide
YGGGFQTGTSSLHVYDGKFL

SEQ ID NO: 8417 - protein, 20 aa, Artificial sequence
  synthetic peptide
GGGFQTGTSSLHVYDGKFLA

SEQ ID NO: 8418 - protein, 20 aa, Artificial sequence
  synthetic peptide
GGFQTGTSSLHVYDGKFLAR

SEQ ID NO: 8419 - protein, 20 aa, Artificial sequence
  synthetic peptide
GFQTGTSSLHVYDGKFLARV

SEQ ID NO: 8420 - protein, 20 aa, Artificial sequence
  synthetic peptide
FQTGTSSLHVYDGKFLARVE

SEQ ID NO: 8421 - protein, 20 aa, Artificial sequence
  synthetic peptide
QTGTSSLHVYDGKFLARVER

SEQ ID NO: 8422 - protein, 20 aa, Artificial sequence
  synthetic peptide
TGTSSLHVYDGKFLARVERV

SEQ ID NO: 8423 - protein, 20 aa, Artificial sequence
  synthetic peptide
GTSSLHVYDGKFLARVERVI

SEQ ID NO: 8424 - protein, 20 aa, Artificial sequence
  synthetic peptide
TSSLHVYDGKFLARVERVIV

SEQ ID NO: 8425 - protein, 20 aa, Artificial sequence
  synthetic peptide
SSLHVYDGKFLARVERVIVV

SEQ ID NO: 8426 - protein, 20 aa, Artificial sequence
  synthetic peptide
SLHVYDGKFLARVERVIVVS

SEQ ID NO: 8427 - protein, 20 aa, Artificial sequence
  synthetic peptide
LHVYDGKFLARVERVIVVSM

SEQ ID NO: 8428 - protein, 20 aa, Artificial sequence
  synthetic peptide
HVYDGKFLARVERVIVVSMN

SEQ ID NO: 8429 - protein, 20 aa, Artificial sequence
  synthetic peptide
VYDGKFLARVERVIVVSMNY

SEQ ID NO: 8430 - protein, 20 aa, Artificial sequence
  synthetic peptide
YDGKFLARVERVIVVSMNYR

SEQ ID NO: 8431 - protein, 20 aa, Artificial sequence
  synthetic peptide
DGKFLARVERVIVVSMNYRV

SEQ ID NO: 8432 - protein, 20 aa, Artificial sequence
  synthetic peptide
GKFLARVERVIVVSMNYRVG

SEQ ID NO: 8433 - protein, 20 aa, Artificial sequence
  synthetic peptide
KFLARVERVIVVSMNYRVGA

SEQ ID NO: 8434 - protein, 20 aa, Artificial sequence
  synthetic peptide
FLARVERVIVVSMNYRVGAL

SEQ ID NO: 8435 - protein, 20 aa, Artificial sequence
  synthetic peptide
LARVERVIVVSMNYRVGALG

SEQ ID NO: 8436 - protein, 20 aa, Artificial sequence
  synthetic peptide
ARVERVIVVSMNYRVGALGF

SEQ ID NO: 8437 - protein, 20 aa, Artificial sequence
  synthetic peptide
RVERVIVVSMNYRVGALGFL

SEQ ID NO: 8438 - protein, 20 aa, Artificial sequence
  synthetic peptide
VERVIVVSMNYRVGALGFLA

SEQ ID NO: 8439 - protein, 20 aa, Artificial sequence
  synthetic peptide
ERVIVVSMNYRVGALGFLAL

SEQ ID NO: 8440 - protein, 20 aa, Artificial sequence
  synthetic peptide
RVIVVSMNYRVGALGFLALP

SEQ ID NO: 8441 - protein, 20 aa, Artificial sequence
  synthetic peptide
VIVVSMNYRVGALGFLALPG

SEQ ID NO: 8442 - protein, 20 aa, Artificial sequence
  synthetic peptide
IVVSMNYRVGALGFLALPGN

SEQ ID NO: 8443 - protein, 20 aa, Artificial sequence
  synthetic peptide
VVSMNYRVGALGFLALPGNP

SEQ ID NO: 8444 - protein, 20 aa, Artificial sequence
  synthetic peptide
VSMNYRVGALGFLALPGNPE

SEQ ID NO: 8445 - protein, 20 aa, Artificial sequence
  synthetic peptide
SMNYRVGALGFLALPGNPEA

SEQ ID NO: 8446 - protein, 20 aa, Artificial sequence
  synthetic peptide
MNYRVGALGFLALPGNPEAP

SEQ ID NO: 8447 - protein, 20 aa, Artificial sequence
  synthetic peptide
NYRVGALGFLALPGNPEAPG

SEQ ID NO: 8448 - protein, 20 aa, Artificial sequence
  synthetic peptide
YRVGALGFLALPGNPEAPGN

SEQ ID NO: 8449 - protein, 20 aa, Artificial sequence
  synthetic peptide
RVGALGFLALPGNPEAPGNM

SEQ ID NO: 8450 - protein, 20 aa, Artificial sequence
  synthetic peptide
VGALGFLALPGNPEAPGNMG

SEQ ID NO: 8451 - protein, 20 aa, Artificial sequence
  synthetic peptide
GALGFLALPGNPEAPGNMGL

SEQ ID NO: 8452 - protein, 20 aa, Artificial sequence
  synthetic peptide
ALGFLALPGNPEAPGNMGLF

SEQ ID NO: 8453 - protein, 20 aa, Artificial sequence
  synthetic peptide
LGFLALPGNPEAPGNMGLFD

SEQ ID NO: 8454 - protein, 20 aa, Artificial sequence
  synthetic peptide
GFLALPGNPEAPGNMGLFDQ

SEQ ID NO: 8455 - protein, 20 aa, Artificial sequence
  synthetic peptide
FLALPGNPEAPGNMGLFDQQ

SEQ ID NO: 8456 - protein, 20 aa, Artificial sequence
  synthetic peptide
LALPGNPEAPGNMGLFDQQL

SEQ ID NO: 8457 - protein, 20 aa, Artificial sequence
  synthetic peptide
ALPGNPEAPGNMGLFDQQLA

SEQ ID NO: 8458 - protein, 20 aa, Artificial sequence
  synthetic peptide
LPGNPEAPGNMGLFDQQLAL

SEQ ID NO: 8459 - protein, 20 aa, Artificial sequence
  synthetic peptide
PGNPEAPGNMGLFDQQLALQ

SEQ ID NO: 8460 - protein, 20 aa, Artificial sequence
  synthetic peptide
GNPEAPGNMGLFDQQLALQW

SEQ ID NO: 8461 - protein, 20 aa, Artificial sequence
  synthetic peptide
NPEAPGNMGLFDQQLALQWV

SEQ ID NO: 8462 - protein, 20 aa, Artificial sequence
  synthetic peptide
PEAPGNMGLFDQQLALQWVQ

SEQ ID NO: 8463 - protein, 20 aa, Artificial sequence
  synthetic peptide
EAPGNMGLFDQQLALQWVQK

SEQ ID NO: 8464 - protein, 20 aa, Artificial sequence
  synthetic peptide
APGNMGLFDQQLALQWVQKN

SEQ ID NO: 8465 - protein, 20 aa, Artificial sequence
  synthetic peptide
PGNMGLFDQQLALQWVQKNI

SEQ ID NO: 8466 - protein, 20 aa, Artificial sequence
  synthetic peptide
GNMGLFDQQLALQWVQKNIA

SEQ ID NO: 8467 - protein, 20 aa, Artificial sequence
  synthetic peptide
NMGLFDQQLALQWVQKNIAA

SEQ ID NO: 8468 - protein, 20 aa, Artificial sequence
  synthetic peptide
MGLFDQQLALQWVQKNIAAF

SEQ ID NO: 8469 - protein, 20 aa, Artificial sequence
  synthetic peptide
GLFDQQLALQWVQKNIAAFG

SEQ ID NO: 8470 - protein, 20 aa, Artificial sequence
  synthetic peptide
LFDQQLALQWVQKNIAAFGG

SEQ ID NO: 8471 - protein, 20 aa, Artificial sequence
  synthetic peptide
FDQQLALQWVQKNIAAFGGN

SEQ ID NO: 8472 - protein, 20 aa, Artificial sequence
  synthetic peptide
DQQLALQWVQKNIAAFGGNP

SEQ ID NO: 8473 - protein, 20 aa, Artificial sequence
  synthetic peptide
QQLALQWVQKNIAAFGGNPK

SEQ ID NO: 8474 - protein, 20 aa, Artificial sequence
  synthetic peptide
QLALQWVQKNIAAFGGNPKS

SEQ ID NO: 8475 - protein, 20 aa, Artificial sequence
  synthetic peptide
LALQWVQKNIAAFGGNPKSV

SEQ ID NO: 8476 - protein, 20 aa, Artificial sequence
  synthetic peptide
ALQWVQKNIAAFGGNPKSVT

SEQ ID NO: 8477 - protein, 20 aa, Artificial sequence
  synthetic peptide
LQWVQKNIAAFGGNPKSVTL

SEQ ID NO: 8478 - protein, 20 aa, Artificial sequence
  synthetic peptide
QWVQKNIAAFGGNPKSVTLF

SEQ ID NO: 8479 - protein, 20 aa, Artificial sequence
  synthetic peptide
WVQKNIAAFGGNPKSVTLFG

SEQ ID NO: 8480 - protein, 20 aa, Artificial sequence
  synthetic peptide
VQKNIAAFGGNPKSVTLFGE

SEQ ID NO: 8481 - protein, 20 aa, Artificial sequence
  synthetic peptide
QKNIAAFGGNPKSVTLFGES

SEQ ID NO: 8482 - protein, 20 aa, Artificial sequence
  synthetic peptide
KNIAAFGGNPKSVTLFGESA

SEQ ID NO: 8483 - protein, 20 aa, Artificial sequence
  synthetic peptide
NIAAFGGNPKSVTLFGESAG

SEQ ID NO: 8484 - protein, 20 aa, Artificial sequence
  synthetic peptide
IAAFGGNPKSVTLFGESAGA

SEQ ID NO: 8485 - protein, 20 aa, Artificial sequence
  synthetic peptide
AAFGGNPKSVTLFGESAGAA

SEQ ID NO: 8486 - protein, 20 aa, Artificial sequence
  synthetic peptide
AFGGNPKSVTLFGESAGAAS

SEQ ID NO: 8487 - protein, 20 aa, Artificial sequence
  synthetic peptide
FGGNPKSVTLFGESAGAASV

SEQ ID NO: 8488 - protein, 20 aa, Artificial sequence
  synthetic peptide
GGNPKSVTLFGESAGAASVS

SEQ ID NO: 8489 - protein, 20 aa, Artificial sequence
  synthetic peptide
GNPKSVTLFGESAGAASVSL

SEQ ID NO: 8490 - protein, 20 aa, Artificial sequence
  synthetic peptide
NPKSVTLFGESAGAASVSLH

SEQ ID NO: 8491 - protein, 20 aa, Artificial sequence
  synthetic peptide
PKSVTLFGESAGAASVSLHL

SEQ ID NO: 8492 - protein, 20 aa, Artificial sequence
  synthetic peptide
KSVTLFGESAGAASVSLHLL

SEQ ID NO: 8493 - protein, 20 aa, Artificial sequence
  synthetic peptide
SVTLFGESAGAASVSLHLLS

SEQ ID NO: 8494 - protein, 20 aa, Artificial sequence
  synthetic peptide
VTLFGESAGAASVSLHLLSP

SEQ ID NO: 8495 - protein, 20 aa, Artificial sequence
  synthetic peptide
TLFGESAGAASVSLHLLSPG

SEQ ID NO: 8496 - protein, 20 aa, Artificial sequence
  synthetic peptide
LFGESAGAASVSLHLLSPGS

SEQ ID NO: 8497 - protein, 20 aa, Artificial sequence
  synthetic peptide
FGESAGAASVSLHLLSPGSH

SEQ ID NO: 8498 - protein, 20 aa, Artificial sequence
  synthetic peptide
GESAGAASVSLHLLSPGSHS

SEQ ID NO: 8499 - protein, 20 aa, Artificial sequence
  synthetic peptide
ESAGAASVSLHLLSPGSHSL

SEQ ID NO: 8500 - protein, 20 aa, Artificial sequence
  synthetic peptide
SAGAASVSLHLLSPGSHSLF

SEQ ID NO: 8501 - protein, 20 aa, Artificial sequence
  synthetic peptide
AGAASVSLHLLSPGSHSLFT

SEQ ID NO: 8502 - protein, 20 aa, Artificial sequence
  synthetic peptide
GAASVSLHLLSPGSHSLFTR

SEQ ID NO: 8503 - protein, 20 aa, Artificial sequence
  synthetic peptide
AASVSLHLLSPGSHSLFTRA

SEQ ID NO: 8504 - protein, 20 aa, Artificial sequence
  synthetic peptide
ASVSLHLLSPGSHSLFTRAI

SEQ ID NO: 8505 - protein, 20 aa, Artificial sequence
  synthetic peptide
SVSLHLLSPGSHSLFTRAIL

SEQ ID NO: 8506 - protein, 20 aa, Artificial sequence
  synthetic peptide
VSLHLLSPGSHSLFTRAILQ

SEQ ID NO: 8507 - protein, 20 aa, Artificial sequence
  synthetic peptide
SLHLLSPGSHSLFTRAILQS

SEQ ID NO: 8508 - protein, 20 aa, Artificial sequence
  synthetic peptide
LHLLSPGSHSLFTRAILQSG

SEQ ID NO: 8509 - protein, 20 aa, Artificial sequence
  synthetic peptide
HLLSPGSHSLFTRAILQSGS

SEQ ID NO: 8510 - protein, 20 aa, Artificial sequence
  synthetic peptide
LLSPGSHSLFTRAILQSGSF

SEQ ID NO: 8511 - protein, 20 aa, Artificial sequence
  synthetic peptide
LSPGSHSLFTRAILQSGSFN

SEQ ID NO: 8512 - protein, 20 aa, Artificial sequence
  synthetic peptide
SPGSHSLFTRAILQSGSFNA

SEQ ID NO: 8513 - protein, 20 aa, Artificial sequence
  synthetic peptide
PGSHSLFTRAILQSGSFNAP

SEQ ID NO: 8514 - protein, 20 aa, Artificial sequence
  synthetic peptide
GSHSLFTRAILQSGSFNAPW

SEQ ID NO: 8515 - protein, 20 aa, Artificial sequence
  synthetic peptide
SHSLFTRAILQSGSFNAPWA

SEQ ID NO: 8516 - protein, 20 aa, Artificial sequence
  synthetic peptide
HSLFTRAILQSGSFNAPWAV

SEQ ID NO: 8517 - protein, 20 aa, Artificial sequence
  synthetic peptide
SLFTRAILQSGSFNAPWAVT

SEQ ID NO: 8518 - protein, 20 aa, Artificial sequence
  synthetic peptide
LFTRAILQSGSFNAPWAVTS

SEQ ID NO: 8519 - protein, 20 aa, Artificial sequence
  synthetic peptide
FTRAILQSGSFNAPWAVTSL

SEQ ID NO: 8520 - protein, 20 aa, Artificial sequence
  synthetic peptide
TRAILQSGSFNAPWAVTSLY

SEQ ID NO: 8521 - protein, 20 aa, Artificial sequence
  synthetic peptide
RAILQSGSFNAPWAVTSLYE

SEQ ID NO: 8522 - protein, 20 aa, Artificial sequence
  synthetic peptide
AILQSGSFNAPWAVTSLYEA

SEQ ID NO: 8523 - protein, 20 aa, Artificial sequence
  synthetic peptide
ILQSGSFNAPWAVTSLYEAR

SEQ ID NO: 8524 - protein, 20 aa, Artificial sequence
  synthetic peptide
LQSGSFNAPWAVTSLYEARN

SEQ ID NO: 8525 - protein, 20 aa, Artificial sequence
  synthetic peptide
QSGSFNAPWAVTSLYEARNR

SEQ ID NO: 8526 - protein, 20 aa, Artificial sequence
  synthetic peptide
SGSFNAPWAVTSLYEARNRT

SEQ ID NO: 8527 - protein, 20 aa, Artificial sequence
  synthetic peptide
GSFNAPWAVTSLYEARNRTL

SEQ ID NO: 8528 - protein, 20 aa, Artificial sequence
  synthetic peptide
SFNAPWAVTSLYEARNRTLN

SEQ ID NO: 8529 - protein, 20 aa, Artificial sequence
  synthetic peptide
FNAPWAVTSLYEARNRTLNL

SEQ ID NO: 8530 - protein, 20 aa, Artificial sequence
  synthetic peptide
NAPWAVTSLYEARNRTLNLA

SEQ ID NO: 8531 - protein, 20 aa, Artificial sequence
  synthetic peptide
APWAVTSLYEARNRTLNLAK

SEQ ID NO: 8532 - protein, 20 aa, Artificial sequence
  synthetic peptide
PWAVTSLYEARNRTLNLAKL

SEQ ID NO: 8533 - protein, 20 aa, Artificial sequence
  synthetic peptide
WAVTSLYEARNRTLNLAKLT

SEQ ID NO: 8534 - protein, 20 aa, Artificial sequence
  synthetic peptide
AVTSLYEARNRTLNLAKLTG

SEQ ID NO: 8535 - protein, 20 aa, Artificial sequence
  synthetic peptide
VTSLYEARNRTLNLAKLTGC

SEQ ID NO: 8536 - protein, 20 aa, Artificial sequence
  synthetic peptide
TSLYEARNRTLNLAKLTGCS

SEQ ID NO: 8537 - protein, 20 aa, Artificial sequence
  synthetic peptide
SLYEARNRTLNLAKLTGCSR

SEQ ID NO: 8538 - protein, 20 aa, Artificial sequence
  synthetic peptide
LYEARNRTLNLAKLTGCSRE

SEQ ID NO: 8539 - protein, 20 aa, Artificial sequence
  synthetic peptide
YEARNRTLNLAKLTGCSREN

SEQ ID NO: 8540 - protein, 20 aa, Artificial sequence
  synthetic peptide
EARNRTLNLAKLTGCSRENE

SEQ ID NO: 8541 - protein, 20 aa, Artificial sequence
  synthetic peptide
ARNRTLNLAKLTGCSRENET

SEQ ID NO: 8542 - protein, 20 aa, Artificial sequence
  synthetic peptide
RNRTLNLAKLTGCSRENETE

SEQ ID NO: 8543 - protein, 20 aa, Artificial sequence
  synthetic peptide
NRTLNLAKLTGCSRENETEI

SEQ ID NO: 8544 - protein, 20 aa, Artificial sequence
  synthetic peptide
RTLNLAKLTGCSRENETEII

SEQ ID NO: 8545 - protein, 20 aa, Artificial sequence
  synthetic peptide
TLNLAKLTGCSRENETEIIK

SEQ ID NO: 8546 - protein, 20 aa, Artificial sequence
  synthetic peptide
LNLAKLTGCSRENETEIIKC

SEQ ID NO: 8547 - protein, 20 aa, Artificial sequence
  synthetic peptide
NLAKLTGCSRENETEIIKCL

SEQ ID NO: 8548 - protein, 20 aa, Artificial sequence
  synthetic peptide
LAKLTGCSRENETEIIKCLR

SEQ ID NO: 8549 - protein, 20 aa, Artificial sequence
  synthetic peptide
AKLTGCSRENETEIIKCLRN

SEQ ID NO: 8550 - protein, 20 aa, Artificial sequence
  synthetic peptide
KLTGCSRENETEIIKCLRNK

SEQ ID NO: 8551 - protein, 20 aa, Artificial sequence
  synthetic peptide
LTGCSRENETEIIKCLRNKD

SEQ ID NO: 8552 - protein, 20 aa, Artificial sequence
  synthetic peptide
TGCSRENETEIIKCLRNKDP

SEQ ID NO: 8553 - protein, 20 aa, Artificial sequence
  synthetic peptide
GCSRENETEIIKCLRNKDPQ

SEQ ID NO: 8554 - protein, 20 aa, Artificial sequence
  synthetic peptide
CSRENETEIIKCLRNKDPQE

SEQ ID NO: 8555 - protein, 20 aa, Artificial sequence
  synthetic peptide
SRENETEIIKCLRNKDPQEI

SEQ ID NO: 8556 - protein, 20 aa, Artificial sequence
  synthetic peptide
RENETEIIKCLRNKDPQEIL

SEQ ID NO: 8557 - protein, 20 aa, Artificial sequence
  synthetic peptide
ENETEIIKCLRNKDPQEILL

SEQ ID NO: 8558 - protein, 20 aa, Artificial sequence
  synthetic peptide
NETEIIKCLRNKDPQEILLN

SEQ ID NO: 8559 - protein, 20 aa, Artificial sequence
  synthetic peptide
ETEIIKCLRNKDPQEILLNE

SEQ ID NO: 8560 - protein, 20 aa, Artificial sequence
  synthetic peptide
TEIIKCLRNKDPQEILLNEA

SEQ ID NO: 8561 - protein, 20 aa, Artificial sequence
  synthetic peptide
EIIKCLRNKDPQEILLNEAF

SEQ ID NO: 8562 - protein, 20 aa, Artificial sequence
  synthetic peptide
IIKCLRNKDPQEILLNEAFV

SEQ ID NO: 8563 - protein, 20 aa, Artificial sequence
  synthetic peptide
IKCLRNKDPQEILLNEAFVV

SEQ ID NO: 8564 - protein, 20 aa, Artificial sequence
  synthetic peptide
KCLRNKDPQEILLNEAFVVP

SEQ ID NO: 8565 - protein, 20 aa, Artificial sequence
  synthetic peptide
CLRNKDPQEILLNEAFVVPY

SEQ ID NO: 8566 - protein, 20 aa, Artificial sequence
  synthetic peptide
LRNKDPQEILLNEAFVVPYG

SEQ ID NO: 8567 - protein, 20 aa, Artificial sequence
  synthetic peptide
RNKDPQEILLNEAFVVPYGT

SEQ ID NO: 8568 - protein, 20 aa, Artificial sequence
  synthetic peptide
NKDPQEILLNEAFVVPYGTP

SEQ ID NO: 8569 - protein, 20 aa, Artificial sequence
  synthetic peptide
KDPQEILLNEAFVVPYGTPL

SEQ ID NO: 8570 - protein, 20 aa, Artificial sequence
  synthetic peptide
DPQEILLNEAFVVPYGTPLS

SEQ ID NO: 8571 - protein, 20 aa, Artificial sequence
  synthetic peptide
PQEILLNEAFVVPYGTPLSV

SEQ ID NO: 8572 - protein, 20 aa, Artificial sequence
  synthetic peptide
QEILLNEAFVVPYGTPLSVN

SEQ ID NO: 8573 - protein, 20 aa, Artificial sequence
  synthetic peptide
EILLNEAFVVPYGTPLSVNF

SEQ ID NO: 8574 - protein, 20 aa, Artificial sequence
  synthetic peptide
ILLNEAFVVPYGTPLSVNFG

SEQ ID NO: 8575 - protein, 20 aa, Artificial sequence
  synthetic peptide
LLNEAFVVPYGTPLSVNFGP

SEQ ID NO: 8576 - protein, 20 aa, Artificial sequence
  synthetic peptide
LNEAFVVPYGTPLSVNFGPT

SEQ ID NO: 8577 - protein, 20 aa, Artificial sequence
  synthetic peptide
NEAFVVPYGTPLSVNFGPTV

SEQ ID NO: 8578 - protein, 20 aa, Artificial sequence
  synthetic peptide
EAFVVPYGTPLSVNFGPTVD

SEQ ID NO: 8579 - protein, 20 aa, Artificial sequence
  synthetic peptide
AFVVPYGTPLSVNFGPTVDG

SEQ ID NO: 8580 - protein, 20 aa, Artificial sequence
  synthetic peptide
FVVPYGTPLSVNFGPTVDGD

SEQ ID NO: 8581 - protein, 20 aa, Artificial sequence
  synthetic peptide
VVPYGTPLSVNFGPTVDGDF

SEQ ID NO: 8582 - protein, 20 aa, Artificial sequence
  synthetic peptide
VPYGTPLSVNFGPTVDGDFL

SEQ ID NO: 8583 - protein, 20 aa, Artificial sequence
  synthetic peptide
PYGTPLSVNFGPTVDGDFLT

SEQ ID NO: 8584 - protein, 20 aa, Artificial sequence
  synthetic peptide
YGTPLSVNFGPTVDGDFLTD

SEQ ID NO: 8585 - protein, 20 aa, Artificial sequence
  synthetic peptide
GTPLSVNFGPTVDGDFLTDM

SEQ ID NO: 8586 - protein, 20 aa, Artificial sequence
  synthetic peptide
TPLSVNFGPTVDGDFLTDMP

SEQ ID NO: 8587 - protein, 20 aa, Artificial sequence
  synthetic peptide
PLSVNFGPTVDGDFLTDMPD

SEQ ID NO: 8588 - protein, 20 aa, Artificial sequence
  synthetic peptide
LSVNFGPTVDGDFLTDMPDI

SEQ ID NO: 8589 - protein, 20 aa, Artificial sequence
  synthetic peptide
SVNFGPTVDGDFLTDMPDIL

SEQ ID NO: 8590 - protein, 20 aa, Artificial sequence
  synthetic peptide
VNFGPTVDGDFLTDMPDILL

SEQ ID NO: 8591 - protein, 20 aa, Artificial sequence
  synthetic peptide
NFGPTVDGDFLTDMPDILLE

SEQ ID NO: 8592 - protein, 20 aa, Artificial sequence
  synthetic peptide
FGPTVDGDFLTDMPDILLEL

SEQ ID NO: 8593 - protein, 20 aa, Artificial sequence
  synthetic peptide
GPTVDGDFLTDMPDILLELG

SEQ ID NO: 8594 - protein, 20 aa, Artificial sequence
  synthetic peptide
PTVDGDFLTDMPDILLELGQ

SEQ ID NO: 8595 - protein, 20 aa, Artificial sequence
  synthetic peptide
TVDGDFLTDMPDILLELGQF

SEQ ID NO: 8596 - protein, 20 aa, Artificial sequence
  synthetic peptide
VDGDFLTDMPDILLELGQFK

SEQ ID NO: 8597 - protein, 20 aa, Artificial sequence
  synthetic peptide
DGDFLTDMPDILLELGQFKK

SEQ ID NO: 8598 - protein, 20 aa, Artificial sequence
  synthetic peptide
GDFLTDMPDILLELGQFKKT

SEQ ID NO: 8599 - protein, 20 aa, Artificial sequence
  synthetic peptide
DFLTDMPDILLELGQFKKTQ

SEQ ID NO: 8600 - protein, 20 aa, Artificial sequence
  synthetic peptide
FLTDMPDILLELGQFKKTQI

SEQ ID NO: 8601 - protein, 20 aa, Artificial sequence
  synthetic peptide
LTDMPDILLELGQFKKTQIL

SEQ ID NO: 8602 - protein, 20 aa, Artificial sequence
  synthetic peptide
TDMPDILLELGQFKKTQILV

SEQ ID NO: 8603 - protein, 20 aa, Artificial sequence
  synthetic peptide
DMPDILLELGQFKKTQILVG

SEQ ID NO: 8604 - protein, 20 aa, Artificial sequence
  synthetic peptide
MPDILLELGQFKKTQILVGV

SEQ ID NO: 8605 - protein, 20 aa, Artificial sequence
  synthetic peptide
PDILLELGQFKKTQILVGVN

SEQ ID NO: 8606 - protein, 20 aa, Artificial sequence
  synthetic peptide
DILLELGQFKKTQILVGVNK

SEQ ID NO: 8607 - protein, 20 aa, Artificial sequence
  synthetic peptide
ILLELGQFKKTQILVGVNKD

SEQ ID NO: 8608 - protein, 20 aa, Artificial sequence
  synthetic peptide
LLELGQFKKTQILVGVNKDE

SEQ ID NO: 8609 - protein, 20 aa, Artificial sequence
  synthetic peptide
LELGQFKKTQILVGVNKDEG

SEQ ID NO: 8610 - protein, 20 aa, Artificial sequence
  synthetic peptide
ELGQFKKTQILVGVNKDEGT

SEQ ID NO: 8611 - protein, 20 aa, Artificial sequence
  synthetic peptide
LGQFKKTQILVGVNKDEGTA

SEQ ID NO: 8612 - protein, 20 aa, Artificial sequence
  synthetic peptide
GQFKKTQILVGVNKDEGTAF

SEQ ID NO: 8613 - protein, 20 aa, Artificial sequence
  synthetic peptide
QFKKTQILVGVNKDEGTAFL

SEQ ID NO: 8614 - protein, 20 aa, Artificial sequence
  synthetic peptide
FKKTQILVGVNKDEGTAFLV

SEQ ID NO: 8615 - protein, 20 aa, Artificial sequence
  synthetic peptide
KKTQILVGVNKDEGTAFLVY

SEQ ID NO: 8616 - protein, 20 aa, Artificial sequence
  synthetic peptide
KTQILVGVNKDEGTAFLVYG

SEQ ID NO: 8617 - protein, 20 aa, Artificial sequence
  synthetic peptide
TQILVGVNKDEGTAFLVYGA

SEQ ID NO: 8618 - protein, 20 aa, Artificial sequence
  synthetic peptide
QILVGVNKDEGTAFLVYGAP

SEQ ID NO: 8619 - protein, 20 aa, Artificial sequence
  synthetic peptide
ILVGVNKDEGTAFLVYGAPG

SEQ ID NO: 8620 - protein, 20 aa, Artificial sequence
  synthetic peptide
LVGVNKDEGTAFLVYGAPGF

SEQ ID NO: 8621 - protein, 20 aa, Artificial sequence
  synthetic peptide
VGVNKDEGTAFLVYGAPGFS

SEQ ID NO: 8622 - protein, 20 aa, Artificial sequence
  synthetic peptide
GVNKDEGTAFLVYGAPGFSK

SEQ ID NO: 8623 - protein, 20 aa, Artificial sequence
  synthetic peptide
VNKDEGTAFLVYGAPGFSKD

SEQ ID NO: 8624 - protein, 20 aa, Artificial sequence
  synthetic peptide
NKDEGTAFLVYGAPGFSKDN

SEQ ID NO: 8625 - protein, 20 aa, Artificial sequence
  synthetic peptide
KDEGTAFLVYGAPGFSKDNN

SEQ ID NO: 8626 - protein, 20 aa, Artificial sequence
  synthetic peptide
DEGTAFLVYGAPGFSKDNNS

SEQ ID NO: 8627 - protein, 20 aa, Artificial sequence
  synthetic peptide
EGTAFLVYGAPGFSKDNNSI

SEQ ID NO: 8628 - protein, 20 aa, Artificial sequence
  synthetic peptide
GTAFLVYGAPGFSKDNNSII

SEQ ID NO: 8629 - protein, 20 aa, Artificial sequence
  synthetic peptide
TAFLVYGAPGFSKDNNSIIT

SEQ ID NO: 8630 - protein, 20 aa, Artificial sequence
  synthetic peptide
AFLVYGAPGFSKDNNSIITR

SEQ ID NO: 8631 - protein, 20 aa, Artificial sequence
  synthetic peptide
FLVYGAPGFSKDNNSIITRK

SEQ ID NO: 8632 - protein, 20 aa, Artificial sequence
  synthetic peptide
LVYGAPGFSKDNNSIITRKE

SEQ ID NO: 8633 - protein, 20 aa, Artificial sequence
  synthetic peptide
VYGAPGFSKDNNSIITRKEF

SEQ ID NO: 8634 - protein, 20 aa, Artificial sequence
  synthetic peptide
YGAPGFSKDNNSIITRKEFQ

SEQ ID NO: 8635 - protein, 20 aa, Artificial sequence
  synthetic peptide
GAPGFSKDNNSIITRKEFQE

SEQ ID NO: 8636 - protein, 20 aa, Artificial sequence
  synthetic peptide
APGFSKDNNSIITRKEFQEG

SEQ ID NO: 8637 - protein, 20 aa, Artificial sequence
  synthetic peptide
PGFSKDNNSIITRKEFQEGL

SEQ ID NO: 8638 - protein, 20 aa, Artificial sequence
  synthetic peptide
GFSKDNNSIITRKEFQEGLK

SEQ ID NO: 8639 - protein, 20 aa, Artificial sequence
  synthetic peptide
FSKDNNSIITRKEFQEGLKI

SEQ ID NO: 8640 - protein, 20 aa, Artificial sequence
  synthetic peptide
SKDNNSIITRKEFQEGLKIF

SEQ ID NO: 8641 - protein, 20 aa, Artificial sequence
  synthetic peptide
KDNNSIITRKEFQEGLKIFF

SEQ ID NO: 8642 - protein, 20 aa, Artificial sequence
  synthetic peptide
DNNSIITRKEFQEGLKIFFP

SEQ ID NO: 8643 - protein, 20 aa, Artificial sequence
  synthetic peptide
NNSIITRKEFQEGLKIFFPG

SEQ ID NO: 8644 - protein, 20 aa, Artificial sequence
  synthetic peptide
NSIITRKEFQEGLKIFFPGV

SEQ ID NO: 8645 - protein, 20 aa, Artificial sequence
  synthetic peptide
SIITRKEFQEGLKIFFPGVS

SEQ ID NO: 8646 - protein, 20 aa, Artificial sequence
  synthetic peptide
IITRKEFQEGLKIFFPGVSE

SEQ ID NO: 8647 - protein, 20 aa, Artificial sequence
  synthetic peptide
ITRKEFQEGLKIFFPGVSEF

SEQ ID NO: 8648 - protein, 20 aa, Artificial sequence
  synthetic peptide
TRKEFQEGLKIFFPGVSEFG

SEQ ID NO: 8649 - protein, 20 aa, Artificial sequence
  synthetic peptide
RKEFQEGLKIFFPGVSEFGK

SEQ ID NO: 8650 - protein, 20 aa, Artificial sequence
  synthetic peptide
KEFQEGLKIFFPGVSEFGKE

SEQ ID NO: 8651 - protein, 20 aa, Artificial sequence
  synthetic peptide
EFQEGLKIFFPGVSEFGKES

SEQ ID NO: 8652 - protein, 20 aa, Artificial sequence
  synthetic peptide
FQEGLKIFFPGVSEFGKESI

SEQ ID NO: 8653 - protein, 20 aa, Artificial sequence
  synthetic peptide
QEGLKIFFPGVSEFGKESIL

SEQ ID NO: 8654 - protein, 20 aa, Artificial sequence
  synthetic peptide
EGLKIFFPGVSEFGKESILF

SEQ ID NO: 8655 - protein, 20 aa, Artificial sequence
  synthetic peptide
GLKIFFPGVSEFGKESILFH

SEQ ID NO: 8656 - protein, 20 aa, Artificial sequence
  synthetic peptide
LKIFFPGVSEFGKESILFHY

SEQ ID NO: 8657 - protein, 20 aa, Artificial sequence
  synthetic peptide
KIFFPGVSEFGKESILFHYT

SEQ ID NO: 8658 - protein, 20 aa, Artificial sequence
  synthetic peptide
IFFPGVSEFGKESILFHYTD

SEQ ID NO: 8659 - protein, 20 aa, Artificial sequence
  synthetic peptide
FFPGVSEFGKESILFHYTDW

SEQ ID NO: 8660 - protein, 20 aa, Artificial sequence
  synthetic peptide
FPGVSEFGKESILFHYTDWV

SEQ ID NO: 8661 - protein, 20 aa, Artificial sequence
  synthetic peptide
PGVSEFGKESILFHYTDWVD

SEQ ID NO: 8662 - protein, 20 aa, Artificial sequence
  synthetic peptide
GVSEFGKESILFHYTDWVDD

SEQ ID NO: 8663 - protein, 20 aa, Artificial sequence
  synthetic peptide
VSEFGKESILFHYTDWVDDQ

SEQ ID NO: 8664 - protein, 20 aa, Artificial sequence
  synthetic peptide
SEFGKESILFHYTDWVDDQR

SEQ ID NO: 8665 - protein, 20 aa, Artificial sequence
  synthetic peptide
EFGKESILFHYTDWVDDQRP

SEQ ID NO: 8666 - protein, 20 aa, Artificial sequence
  synthetic peptide
FGKESILFHYTDWVDDQRPE

SEQ ID NO: 8667 - protein, 20 aa, Artificial sequence
  synthetic peptide
GKESILFHYTDWVDDQRPEN

SEQ ID NO: 8668 - protein, 20 aa, Artificial sequence
  synthetic peptide
KESILFHYTDWVDDQRPENY

SEQ ID NO: 8669 - protein, 20 aa, Artificial sequence
  synthetic peptide
ESILFHYTDWVDDQRPENYR

SEQ ID NO: 8670 - protein, 20 aa, Artificial sequence
  synthetic peptide
SILFHYTDWVDDQRPENYRE

SEQ ID NO: 8671 - protein, 20 aa, Artificial sequence
  synthetic peptide
ILFHYTDWVDDQRPENYREA

SEQ ID NO: 8672 - protein, 20 aa, Artificial sequence
  synthetic peptide
LFHYTDWVDDQRPENYREAL

SEQ ID NO: 8673 - protein, 20 aa, Artificial sequence
  synthetic peptide
FHYTDWVDDQRPENYREALG

SEQ ID NO: 8674 - protein, 20 aa, Artificial sequence
  synthetic peptide
HYTDWVDDQRPENYREALGD

SEQ ID NO: 8675 - protein, 20 aa, Artificial sequence
  synthetic peptide
YTDWVDDQRPENYREALGDV

SEQ ID NO: 8676 - protein, 20 aa, Artificial sequence
  synthetic peptide
TDWVDDQRPENYREALGDVV

SEQ ID NO: 8677 - protein, 20 aa, Artificial sequence
  synthetic peptide
DWVDDQRPENYREALGDVVG

SEQ ID NO: 8678 - protein, 20 aa, Artificial sequence
  synthetic peptide
WVDDQRPENYREALGDVVGD

SEQ ID NO: 8679 - protein, 20 aa, Artificial sequence
  synthetic peptide
VDDQRPENYREALGDVVGDY

SEQ ID NO: 8680 - protein, 20 aa, Artificial sequence
  synthetic peptide
DDQRPENYREALGDVVGDYN

SEQ ID NO: 8681 - protein, 20 aa, Artificial sequence
  synthetic peptide
DQRPENYREALGDVVGDYNF

SEQ ID NO: 8682 - protein, 20 aa, Artificial sequence
  synthetic peptide
QRPENYREALGDVVGDYNFI

SEQ ID NO: 8683 - protein, 20 aa, Artificial sequence
  synthetic peptide
RPENYREALGDVVGDYNFIC

SEQ ID NO: 8684 - protein, 20 aa, Artificial sequence
  synthetic peptide
PENYREALGDVVGDYNFICP

SEQ ID NO: 8685 - protein, 20 aa, Artificial sequence
  synthetic peptide
ENYREALGDVVGDYNFICPA

SEQ ID NO: 8686 - protein, 20 aa, Artificial sequence
  synthetic peptide
NYREALGDVVGDYNFICPAL

SEQ ID NO: 8687 - protein, 20 aa, Artificial sequence
  synthetic peptide
YREALGDVVGDYNFICPALE

SEQ ID NO: 8688 - protein, 20 aa, Artificial sequence
  synthetic peptide
REALGDVVGDYNFICPALEF

SEQ ID NO: 8689 - protein, 20 aa, Artificial sequence
  synthetic peptide
EALGDVVGDYNFICPALEFT

SEQ ID NO: 8690 - protein, 20 aa, Artificial sequence
  synthetic peptide
ALGDVVGDYNFICPALEFTK

SEQ ID NO: 8691 - protein, 20 aa, Artificial sequence
  synthetic peptide
LGDVVGDYNFICPALEFTKK

SEQ ID NO: 8692 - protein, 20 aa, Artificial sequence
  synthetic peptide
GDVVGDYNFICPALEFTKKF

SEQ ID NO: 8693 - protein, 20 aa, Artificial sequence
  synthetic peptide
DVVGDYNFICPALEFTKKFS

SEQ ID NO: 8694 - protein, 20 aa, Artificial sequence
  synthetic peptide
VVGDYNFICPALEFTKKFSE

SEQ ID NO: 8695 - protein, 20 aa, Artificial sequence
  synthetic peptide
VGDYNFICPALEFTKKFSEW

SEQ ID NO: 8696 - protein, 20 aa, Artificial sequence
  synthetic peptide
GDYNFICPALEFTKKFSEWG

SEQ ID NO: 8697 - protein, 20 aa, Artificial sequence
  synthetic peptide
DYNFICPALEFTKKFSEWGN

SEQ ID NO: 8698 - protein, 20 aa, Artificial sequence
  synthetic peptide
YNFICPALEFTKKFSEWGNN

SEQ ID NO: 8699 - protein, 20 aa, Artificial sequence
  synthetic peptide
NFICPALEFTKKFSEWGNNA

SEQ ID NO: 8700 - protein, 20 aa, Artificial sequence
  synthetic peptide
FICPALEFTKKFSEWGNNAF

SEQ ID NO: 8701 - protein, 20 aa, Artificial sequence
  synthetic peptide
ICPALEFTKKFSEWGNNAFF

SEQ ID NO: 8702 - protein, 20 aa, Artificial sequence
  synthetic peptide
CPALEFTKKFSEWGNNAFFY

SEQ ID NO: 8703 - protein, 20 aa, Artificial sequence
  synthetic peptide
PALEFTKKFSEWGNNAFFYY

SEQ ID NO: 8704 - protein, 20 aa, Artificial sequence
  synthetic peptide
ALEFTKKFSEWGNNAFFYYF

SEQ ID NO: 8705 - protein, 20 aa, Artificial sequence
  synthetic peptide
LEFTKKFSEWGNNAFFYYFE

SEQ ID NO: 8706 - protein, 20 aa, Artificial sequence
  synthetic peptide
EFTKKFSEWGNNAFFYYFEH

SEQ ID NO: 8707 - protein, 20 aa, Artificial sequence
  synthetic peptide
FTKKFSEWGNNAFFYYFEHR

SEQ ID NO: 8708 - protein, 20 aa, Artificial sequence
  synthetic peptide
TKKFSEWGNNAFFYYFEHRS

SEQ ID NO: 8709 - protein, 20 aa, Artificial sequence
  synthetic peptide
KKFSEWGNNAFFYYFEHRSS

SEQ ID NO: 8710 - protein, 20 aa, Artificial sequence
  synthetic peptide
KFSEWGNNAFFYYFEHRSSK

SEQ ID NO: 8711 - protein, 20 aa, Artificial sequence
  synthetic peptide
FSEWGNNAFFYYFEHRSSKL

SEQ ID NO: 8712 - protein, 20 aa, Artificial sequence
  synthetic peptide
SEWGNNAFFYYFEHRSSKLP

SEQ ID NO: 8713 - protein, 20 aa, Artificial sequence
  synthetic peptide
EWGNNAFFYYFEHRSSKLPW

SEQ ID NO: 8714 - protein, 20 aa, Artificial sequence
  synthetic peptide
WGNNAFFYYFEHRSSKLPWP

SEQ ID NO: 8715 - protein, 20 aa, Artificial sequence
  synthetic peptide
GNNAFFYYFEHRSSKLPWPE

SEQ ID NO: 8716 - protein, 20 aa, Artificial sequence
  synthetic peptide
NNAFFYYFEHRSSKLPWPEW

SEQ ID NO: 8717 - protein, 20 aa, Artificial sequence
  synthetic peptide
NAFFYYFEHRSSKLPWPEWM

SEQ ID NO: 8718 - protein, 20 aa, Artificial sequence
  synthetic peptide
AFFYYFEHRSSKLPWPEWMG

SEQ ID NO: 8719 - protein, 20 aa, Artificial sequence
  synthetic peptide
FFYYFEHRSSKLPWPEWMGV

SEQ ID NO: 8720 - protein, 20 aa, Artificial sequence
  synthetic peptide
FYYFEHRSSKLPWPEWMGVM

SEQ ID NO: 8721 - protein, 20 aa, Artificial sequence
  synthetic peptide
YYFEHRSSKLPWPEWMGVMH

SEQ ID NO: 8722 - protein, 20 aa, Artificial sequence
  synthetic peptide
YFEHRSSKLPWPEWMGVMHG

SEQ ID NO: 8723 - protein, 20 aa, Artificial sequence
  synthetic peptide
FEHRSSKLPWPEWMGVMHGY

SEQ ID NO: 8724 - protein, 20 aa, Artificial sequence
  synthetic peptide
EHRSSKLPWPEWMGVMHGYE

SEQ ID NO: 8725 - protein, 20 aa, Artificial sequence
  synthetic peptide
HRSSKLPWPEWMGVMHGYEI

SEQ ID NO: 8726 - protein, 20 aa, Artificial sequence
  synthetic peptide
RSSKLPWPEWMGVMHGYEIE

SEQ ID NO: 8727 - protein, 20 aa, Artificial sequence
  synthetic peptide
SSKLPWPEWMGVMHGYEIEF

SEQ ID NO: 8728 - protein, 20 aa, Artificial sequence
  synthetic peptide
SKLPWPEWMGVMHGYEIEFV

SEQ ID NO: 8729 - protein, 20 aa, Artificial sequence
  synthetic peptide
KLPWPEWMGVMHGYEIEFVF

SEQ ID NO: 8730 - protein, 20 aa, Artificial sequence
  synthetic peptide
LPWPEWMGVMHGYEIEFVFG

SEQ ID NO: 8731 - protein, 20 aa, Artificial sequence
  synthetic peptide
PWPEWMGVMHGYEIEFVFGL

SEQ ID NO: 8732 - protein, 20 aa, Artificial sequence
  synthetic peptide
WPEWMGVMHGYEIEFVFGLP

SEQ ID NO: 8733 - protein, 20 aa, Artificial sequence
  synthetic peptide
PEWMGVMHGYEIEFVFGLPL

SEQ ID NO: 8734 - protein, 20 aa, Artificial sequence
  synthetic peptide
EWMGVMHGYEIEFVFGLPLE

SEQ ID NO: 8735 - protein, 20 aa, Artificial sequence
  synthetic peptide
WMGVMHGYEIEFVFGLPLER

SEQ ID NO: 8736 - protein, 20 aa, Artificial sequence
  synthetic peptide
MGVMHGYEIEFVFGLPLERR

SEQ ID NO: 8737 - protein, 20 aa, Artificial sequence
  synthetic peptide
GVMHGYEIEFVFGLPLERRD

SEQ ID NO: 8738 - protein, 20 aa, Artificial sequence
  synthetic peptide
VMHGYEIEFVFGLPLERRDN

SEQ ID NO: 8739 - protein, 20 aa, Artificial sequence
  synthetic peptide
MHGYEIEFVFGLPLERRDNY

SEQ ID NO: 8740 - protein, 20 aa, Artificial sequence
  synthetic peptide
HGYEIEFVFGLPLERRDNYT

SEQ ID NO: 8741 - protein, 20 aa, Artificial sequence
  synthetic peptide
GYEIEFVFGLPLERRDNYTK

SEQ ID NO: 8742 - protein, 20 aa, Artificial sequence
  synthetic peptide
YEIEFVFGLPLERRDNYTKA

SEQ ID NO: 8743 - protein, 20 aa, Artificial sequence
  synthetic peptide
EIEFVFGLPLERRDNYTKAE

SEQ ID NO: 8744 - protein, 20 aa, Artificial sequence
  synthetic peptide
IEFVFGLPLERRDNYTKAEE

SEQ ID NO: 8745 - protein, 20 aa, Artificial sequence
  synthetic peptide
EFVFGLPLERRDNYTKAEEI

SEQ ID NO: 8746 - protein, 20 aa, Artificial sequence
  synthetic peptide
FVFGLPLERRDNYTKAEEIL

SEQ ID NO: 8747 - protein, 20 aa, Artificial sequence
  synthetic peptide
VFGLPLERRDNYTKAEEILS

SEQ ID NO: 8748 - protein, 20 aa, Artificial sequence
  synthetic peptide
FGLPLERRDNYTKAEEILSR

SEQ ID NO: 8749 - protein, 20 aa, Artificial sequence
  synthetic peptide
GLPLERRDNYTKAEEILSRS

SEQ ID NO: 8750 - protein, 20 aa, Artificial sequence
  synthetic peptide
LPLERRDNYTKAEEILSRSI

SEQ ID NO: 8751 - protein, 20 aa, Artificial sequence
  synthetic peptide
PLERRDNYTKAEEILSRSIV

SEQ ID NO: 8752 - protein, 20 aa, Artificial sequence
  synthetic peptide
LERRDNYTKAEEILSRSIVK

SEQ ID NO: 8753 - protein, 20 aa, Artificial sequence
  synthetic peptide
ERRDNYTKAEEILSRSIVKR

SEQ ID NO: 8754 - protein, 20 aa, Artificial sequence
  synthetic peptide
RRDNYTKAEEILSRSIVKRW

SEQ ID NO: 8755 - protein, 20 aa, Artificial sequence
  synthetic peptide
RDNYTKAEEILSRSIVKRWA

SEQ ID NO: 8756 - protein, 20 aa, Artificial sequence
  synthetic peptide
DNYTKAEEILSRSIVKRWAN

SEQ ID NO: 8757 - protein, 20 aa, Artificial sequence
  synthetic peptide
NYTKAEEILSRSIVKRWANF

SEQ ID NO: 8758 - protein, 20 aa, Artificial sequence
  synthetic peptide
YTKAEEILSRSIVKRWANFA

SEQ ID NO: 8759 - protein, 20 aa, Artificial sequence
  synthetic peptide
TKAEEILSRSIVKRWANFAK

SEQ ID NO: 8760 - protein, 20 aa, Artificial sequence
  synthetic peptide
KAEEILSRSIVKRWANFAKY

SEQ ID NO: 8761 - protein, 20 aa, Artificial sequence
  synthetic peptide
AEEILSRSIVKRWANFAKYG

SEQ ID NO: 8762 - protein, 20 aa, Artificial sequence
  synthetic peptide
EEILSRSIVKRWANFAKYGN

SEQ ID NO: 8763 - protein, 20 aa, Artificial sequence
  synthetic peptide
EILSRSIVKRWANFAKYGNP

SEQ ID NO: 8764 - protein, 20 aa, Artificial sequence
  synthetic peptide
ILSRSIVKRWANFAKYGNPN

SEQ ID NO: 8765 - protein, 20 aa, Artificial sequence
  synthetic peptide
LSRSIVKRWANFAKYGNPNE

SEQ ID NO: 8766 - protein, 20 aa, Artificial sequence
  synthetic peptide
SRSIVKRWANFAKYGNPNET

SEQ ID NO: 8767 - protein, 20 aa, Artificial sequence
  synthetic peptide
RSIVKRWANFAKYGNPNETQ

SEQ ID NO: 8768 - protein, 20 aa, Artificial sequence
  synthetic peptide
SIVKRWANFAKYGNPNETQN

SEQ ID NO: 8769 - protein, 20 aa, Artificial sequence
  synthetic peptide
IVKRWANFAKYGNPNETQNN

SEQ ID NO: 8770 - protein, 20 aa, Artificial sequence
  synthetic peptide
VKRWANFAKYGNPNETQNNS

SEQ ID NO: 8771 - protein, 20 aa, Artificial sequence
  synthetic peptide
KRWANFAKYGNPNETQNNST

SEQ ID NO: 8772 - protein, 20 aa, Artificial sequence
  synthetic peptide
RWANFAKYGNPNETQNNSTS

SEQ ID NO: 8773 - protein, 20 aa, Artificial sequence
  synthetic peptide
WANFAKYGNPNETQNNSTSW

SEQ ID NO: 8774 - protein, 20 aa, Artificial sequence
  synthetic peptide
ANFAKYGNPNETQNNSTSWP

SEQ ID NO: 8775 - protein, 20 aa, Artificial sequence
  synthetic peptide
NFAKYGNPNETQNNSTSWPV

SEQ ID NO: 8776 - protein, 20 aa, Artificial sequence
  synthetic peptide
FAKYGNPNETQNNSTSWPVF

SEQ ID NO: 8777 - protein, 20 aa, Artificial sequence
  synthetic peptide
AKYGNPNETQNNSTSWPVFK

SEQ ID NO: 8778 - protein, 20 aa, Artificial sequence
  synthetic peptide
KYGNPNETQNNSTSWPVFKS

SEQ ID NO: 8779 - protein, 20 aa, Artificial sequence
  synthetic peptide
YGNPNETQNNSTSWPVFKST

SEQ ID NO: 8780 - protein, 20 aa, Artificial sequence
  synthetic peptide
GNPNETQNNSTSWPVFKSTE

SEQ ID NO: 8781 - protein, 20 aa, Artificial sequence
  synthetic peptide
NPNETQNNSTSWPVFKSTEQ

SEQ ID NO: 8782 - protein, 20 aa, Artificial sequence
  synthetic peptide
PNETQNNSTSWPVFKSTEQK

SEQ ID NO: 8783 - protein, 20 aa, Artificial sequence
  synthetic peptide
NETQNNSTSWPVFKSTEQKY

SEQ ID NO: 8784 - protein, 20 aa, Artificial sequence
  synthetic peptide
ETQNNSTSWPVFKSTEQKYL

SEQ ID NO: 8785 - protein, 20 aa, Artificial sequence
  synthetic peptide
TQNNSTSWPVFKSTEQKYLT

SEQ ID NO: 8786 - protein, 20 aa, Artificial sequence
  synthetic peptide
QNNSTSWPVFKSTEQKYLTL

SEQ ID NO: 8787 - protein, 20 aa, Artificial sequence
  synthetic peptide
NNSTSWPVFKSTEQKYLTLN

SEQ ID NO: 8788 - protein, 20 aa, Artificial sequence
  synthetic peptide
NSTSWPVFKSTEQKYLTLNT

SEQ ID NO: 8789 - protein, 20 aa, Artificial sequence
  synthetic peptide
STSWPVFKSTEQKYLTLNTE

SEQ ID NO: 8790 - protein, 20 aa, Artificial sequence
  synthetic peptide
TSWPVFKSTEQKYLTLNTES

SEQ ID NO: 8791 - protein, 20 aa, Artificial sequence
  synthetic peptide
SWPVFKSTEQKYLTLNTEST

SEQ ID NO: 8792 - protein, 20 aa, Artificial sequence
  synthetic peptide
WPVFKSTEQKYLTLNTESTR

SEQ ID NO: 8793 - protein, 20 aa, Artificial sequence
  synthetic peptide
PVFKSTEQKYLTLNTESTRI

SEQ ID NO: 8794 - protein, 20 aa, Artificial sequence
  synthetic peptide
VFKSTEQKYLTLNTESTRIM

SEQ ID NO: 8795 - protein, 20 aa, Artificial sequence
  synthetic peptide
FKSTEQKYLTLNTESTRIMT

SEQ ID NO: 8796 - protein, 20 aa, Artificial sequence
  synthetic peptide
KSTEQKYLTLNTESTRIMTK

SEQ ID NO: 8797 - protein, 20 aa, Artificial sequence
  synthetic peptide
STEQKYLTLNTESTRIMTKL

SEQ ID NO: 8798 - protein, 20 aa, Artificial sequence
  synthetic peptide
TEQKYLTLNTESTRIMTKLR

SEQ ID NO: 8799 - protein, 20 aa, Artificial sequence
  synthetic peptide
EQKYLTLNTESTRIMTKLRA

SEQ ID NO: 8800 - protein, 20 aa, Artificial sequence
  synthetic peptide
QKYLTLNTESTRIMTKLRAQ

SEQ ID NO: 8801 - protein, 20 aa, Artificial sequence
  synthetic peptide
KYLTLNTESTRIMTKLRAQQ

SEQ ID NO: 8802 - protein, 20 aa, Artificial sequence
  synthetic peptide
YLTLNTESTRIMTKLRAQQC

SEQ ID NO: 8803 - protein, 20 aa, Artificial sequence
  synthetic peptide
LTLNTESTRIMTKLRAQQCR

SEQ ID NO: 8804 - protein, 20 aa, Artificial sequence
  synthetic peptide
TLNTESTRIMTKLRAQQCRF

SEQ ID NO: 8805 - protein, 20 aa, Artificial sequence
  synthetic peptide
LNTESTRIMTKLRAQQCRFW

SEQ ID NO: 8806 - protein, 20 aa, Artificial sequence
  synthetic peptide
NTESTRIMTKLRAQQCRFWT

SEQ ID NO: 8807 - protein, 20 aa, Artificial sequence
  synthetic peptide
TESTRIMTKLRAQQCRFWTS

SEQ ID NO: 8808 - protein, 20 aa, Artificial sequence
  synthetic peptide
ESTRIMTKLRAQQCRFWTSF

SEQ ID NO: 8809 - protein, 20 aa, Artificial sequence
  synthetic peptide
STRIMTKLRAQQCRFWTSFF

SEQ ID NO: 8810 - protein, 20 aa, Artificial sequence
  synthetic peptide
TRIMTKLRAQQCRFWTSFFP

SEQ ID NO: 8811 - protein, 20 aa, Artificial sequence
  synthetic peptide
RIMTKLRAQQCRFWTSFFPK

SEQ ID NO: 8812 - protein, 20 aa, Artificial sequence
  synthetic peptide
IMTKLRAQQCRFWTSFFPKV

SEQ ID NO: 8813 - protein, 20 aa, Artificial sequence
  synthetic peptide
MTKLRAQQCRFWTSFFPKVL

SEQ ID NO: 8814 - protein, 20 aa, Artificial sequence
  synthetic peptide
TKLRAQQCRFWTSFFPKVLE

SEQ ID NO: 8815 - protein, 20 aa, Artificial sequence
  synthetic peptide
KLRAQQCRFWTSFFPKVLEM

SEQ ID NO: 8816 - protein, 20 aa, Artificial sequence
  synthetic peptide
LRAQQCRFWTSFFPKVLEMT

SEQ ID NO: 8817 - protein, 20 aa, Artificial sequence
  synthetic peptide
RAQQCRFWTSFFPKVLEMTG

SEQ ID NO: 8818 - protein, 20 aa, Artificial sequence
  synthetic peptide
AQQCRFWTSFFPKVLEMTGN

SEQ ID NO: 8819 - protein, 20 aa, Artificial sequence
  synthetic peptide
QQCRFWTSFFPKVLEMTGNI

SEQ ID NO: 8820 - protein, 20 aa, Artificial sequence
  synthetic peptide
QCRFWTSFFPKVLEMTGNID

SEQ ID NO: 8821 - protein, 20 aa, Artificial sequence
  synthetic peptide
CRFWTSFFPKVLEMTGNIDE

SEQ ID NO: 8822 - protein, 20 aa, Artificial sequence
  synthetic peptide
RFWTSFFPKVLEMTGNIDEA

SEQ ID NO: 8823 - protein, 20 aa, Artificial sequence
  synthetic peptide
FWTSFFPKVLEMTGNIDEAE

SEQ ID NO: 8824 - protein, 20 aa, Artificial sequence
  synthetic peptide
WTSFFPKVLEMTGNIDEAEW

SEQ ID NO: 8825 - protein, 20 aa, Artificial sequence
  synthetic peptide
TSFFPKVLEMTGNIDEAEWE

SEQ ID NO: 8826 - protein, 20 aa, Artificial sequence
  synthetic peptide
SFFPKVLEMTGNIDEAEWEW

SEQ ID NO: 8827 - protein, 20 aa, Artificial sequence
  synthetic peptide
FFPKVLEMTGNIDEAEWEWK

SEQ ID NO: 8828 - protein, 20 aa, Artificial sequence
  synthetic peptide
FPKVLEMTGNIDEAEWEWKA

SEQ ID NO: 8829 - protein, 20 aa, Artificial sequence
  synthetic peptide
PKVLEMTGNIDEAEWEWKAG

SEQ ID NO: 8830 - protein, 20 aa, Artificial sequence
  synthetic peptide
KVLEMTGNIDEAEWEWKAGF

SEQ ID NO: 8831 - protein, 20 aa, Artificial sequence
  synthetic peptide
VLEMTGNIDEAEWEWKAGFH

SEQ ID NO: 8832 - protein, 20 aa, Artificial sequence
  synthetic peptide
LEMTGNIDEAEWEWKAGFHR

SEQ ID NO: 8833 - protein, 20 aa, Artificial sequence
  synthetic peptide
EMTGNIDEAEWEWKAGFHRW

SEQ ID NO: 8834 - protein, 20 aa, Artificial sequence
  synthetic peptide
MTGNIDEAEWEWKAGFHRWN

SEQ ID NO: 8835 - protein, 20 aa, Artificial sequence
  synthetic peptide
TGNIDEAEWEWKAGFHRWNN

SEQ ID NO: 8836 - protein, 20 aa, Artificial sequence
  synthetic peptide
GNIDEAEWEWKAGFHRWNNY

SEQ ID NO: 8837 - protein, 20 aa, Artificial sequence
  synthetic peptide
NIDEAEWEWKAGFHRWNNYM

SEQ ID NO: 8838 - protein, 20 aa, Artificial sequence
  synthetic peptide
IDEAEWEWKAGFHRWNNYMM

SEQ ID NO: 8839 - protein, 20 aa, Artificial sequence
  synthetic peptide
DEAEWEWKAGFHRWNNYMMD

SEQ ID NO: 8840 - protein, 20 aa, Artificial sequence
  synthetic peptide
EAEWEWKAGFHRWNNYMMDW

SEQ ID NO: 8841 - protein, 20 aa, Artificial sequence
  synthetic peptide
AEWEWKAGFHRWNNYMMDWK

SEQ ID NO: 8842 - protein, 20 aa, Artificial sequence
  synthetic peptide
EWEWKAGFHRWNNYMMDWKN

SEQ ID NO: 8843 - protein, 20 aa, Artificial sequence
  synthetic peptide
WEWKAGFHRWNNYMMDWKNQ

SEQ ID NO: 8844 - protein, 20 aa, Artificial sequence
  synthetic peptide
EWKAGFHRWNNYMMDWKNQF

SEQ ID NO: 8845 - protein, 20 aa, Artificial sequence
  synthetic peptide
WKAGFHRWNNYMMDWKNQFN

SEQ ID NO: 8846 - protein, 20 aa, Artificial sequence
  synthetic peptide
KAGFHRWNNYMMDWKNQFND

SEQ ID NO: 8847 - protein, 20 aa, Artificial sequence
  synthetic peptide
AGFHRWNNYMMDWKNQFNDY

SEQ ID NO: 8848 - protein, 20 aa, Artificial sequence
  synthetic peptide
GFHRWNNYMMDWKNQFNDYT

SEQ ID NO: 8849 - protein, 20 aa, Artificial sequence
  synthetic peptide
FHRWNNYMMDWKNQFNDYTS

SEQ ID NO: 8850 - protein, 20 aa, Artificial sequence
  synthetic peptide
HRWNNYMMDWKNQFNDYTSK

SEQ ID NO: 8851 - protein, 20 aa, Artificial sequence
  synthetic peptide
RWNNYMMDWKNQFNDYTSKK

SEQ ID NO: 8852 - protein, 20 aa, Artificial sequence
  synthetic peptide
WNNYMMDWKNQFNDYTSKKE

SEQ ID NO: 8853 - protein, 20 aa, Artificial sequence
  synthetic peptide
NNYMMDWKNQFNDYTSKKES

SEQ ID NO: 8854 - protein, 20 aa, Artificial sequence
  synthetic peptide
NYMMDWKNQFNDYTSKKESC

SEQ ID NO: 8855 - protein, 20 aa, Artificial sequence
  synthetic peptide
YMMDWKNQFNDYTSKKESCV

SEQ ID NO: 8856 - protein, 20 aa, Artificial sequence
  synthetic peptide
MMDWKNQFNDYTSKKESCVG

SEQ ID NO: 8857 - protein, 20 aa, Artificial sequence
  synthetic peptide
MDWKNQFNDYTSKKESCVGL

SEQ ID NO: 8858 - protein, 21 aa, Artificial sequence
  synthetic peptide
MHSKVTIICIRFLFWFLLLCM

SEQ ID NO: 8859 - protein, 21 aa, Artificial sequence
  synthetic peptide
HSKVTIICIRFLFWFLLLCML

SEQ ID NO: 8860 - protein, 21 aa, Artificial sequence
  synthetic peptide
SKVTIICIRFLFWFLLLCMLI

SEQ ID NO: 8861 - protein, 21 aa, Artificial sequence
  synthetic peptide
KVTIICIRFLFWFLLLCMLIG

SEQ ID NO: 8862 - protein, 21 aa, Artificial sequence
  synthetic peptide
VTIICIRFLFWFLLLCMLIGK

SEQ ID NO: 8863 - protein, 21 aa, Artificial sequence
  synthetic peptide
TIICIRFLFWFLLLCMLIGKS

SEQ ID NO: 8864 - protein, 21 aa, Artificial sequence
  synthetic peptide
IICIRFLFWFLLLCMLIGKSH

SEQ ID NO: 8865 - protein, 21 aa, Artificial sequence
  synthetic peptide
ICIRFLFWFLLLCMLIGKSHT

SEQ ID NO: 8866 - protein, 21 aa, Artificial sequence
  synthetic peptide
CIRFLFWFLLLCMLIGKSHTE

SEQ ID NO: 8867 - protein, 21 aa, Artificial sequence
  synthetic peptide
IRFLFWFLLLCMLIGKSHTED

SEQ ID NO: 8868 - protein, 21 aa, Artificial sequence
  synthetic peptide
RFLFWFLLLCMLIGKSHTEDD

SEQ ID NO: 8869 - protein, 21 aa, Artificial sequence
  synthetic peptide
FLFWFLLLCMLIGKSHTEDDI

SEQ ID NO: 8870 - protein, 21 aa, Artificial sequence
  synthetic peptide
LFWFLLLCMLIGKSHTEDDII

SEQ ID NO: 8871 - protein, 21 aa, Artificial sequence
  synthetic peptide
FWFLLLCMLIGKSHTEDDIII

SEQ ID NO: 8872 - protein, 21 aa, Artificial sequence
  synthetic peptide
WFLLLCMLIGKSHTEDDIIIA

SEQ ID NO: 8873 - protein, 21 aa, Artificial sequence
  synthetic peptide
FLLLCMLIGKSHTEDDIIIAT

SEQ ID NO: 8874 - protein, 21 aa, Artificial sequence
  synthetic peptide
LLLCMLIGKSHTEDDIIIATK

SEQ ID NO: 8875 - protein, 21 aa, Artificial sequence
  synthetic peptide
LLCMLIGKSHTEDDIIIATKN

SEQ ID NO: 8876 - protein, 21 aa, Artificial sequence
  synthetic peptide
LCMLIGKSHTEDDIIIATKNG

SEQ ID NO: 8877 - protein, 21 aa, Artificial sequence
  synthetic peptide
CMLIGKSHTEDDIIIATKNGK

SEQ ID NO: 8878 - protein, 21 aa, Artificial sequence
  synthetic peptide
MLIGKSHTEDDIIIATKNGKV

SEQ ID NO: 8879 - protein, 21 aa, Artificial sequence
  synthetic peptide
LIGKSHTEDDIIIATKNGKVR

SEQ ID NO: 8880 - protein, 21 aa, Artificial sequence
  synthetic peptide
IGKSHTEDDIIIATKNGKVRG

SEQ ID NO: 8881 - protein, 21 aa, Artificial sequence
  synthetic peptide
GKSHTEDDIIIATKNGKVRGM

SEQ ID NO: 8882 - protein, 21 aa, Artificial sequence
  synthetic peptide
KSHTEDDIIIATKNGKVRGMN

SEQ ID NO: 8883 - protein, 21 aa, Artificial sequence
  synthetic peptide
SHTEDDIIIATKNGKVRGMNL

SEQ ID NO: 8884 - protein, 21 aa, Artificial sequence
  synthetic peptide
HTEDDIIIATKNGKVRGMNLT

SEQ ID NO: 8885 - protein, 21 aa, Artificial sequence
  synthetic peptide
TEDDIIIATKNGKVRGMNLTV

SEQ ID NO: 8886 - protein, 21 aa, Artificial sequence
  synthetic peptide
EDDIIIATKNGKVRGMNLTVF

SEQ ID NO: 8887 - protein, 21 aa, Artificial sequence
  synthetic peptide
DDIIIATKNGKVRGMNLTVFG

SEQ ID NO: 8888 - protein, 21 aa, Artificial sequence
  synthetic peptide
DIIIATKNGKVRGMNLTVFGG

SEQ ID NO: 8889 - protein, 21 aa, Artificial sequence
  synthetic peptide
IIIATKNGKVRGMNLTVFGGT

SEQ ID NO: 8890 - protein, 21 aa, Artificial sequence
  synthetic peptide
IIATKNGKVRGMNLTVFGGTV

SEQ ID NO: 8891 - protein, 21 aa, Artificial sequence
  synthetic peptide
IATKNGKVRGMNLTVFGGTVT

SEQ ID NO: 8892 - protein, 21 aa, Artificial sequence
  synthetic peptide
ATKNGKVRGMNLTVFGGTVTA

SEQ ID NO: 8893 - protein, 21 aa, Artificial sequence
  synthetic peptide
TKNGKVRGMNLTVFGGTVTAF

SEQ ID NO: 8894 - protein, 21 aa, Artificial sequence
  synthetic peptide
KNGKVRGMNLTVFGGTVTAFL

SEQ ID NO: 8895 - protein, 21 aa, Artificial sequence
  synthetic peptide
NGKVRGMNLTVFGGTVTAFLG

SEQ ID NO: 8896 - protein, 21 aa, Artificial sequence
  synthetic peptide
GKVRGMNLTVFGGTVTAFLGI

SEQ ID NO: 8897 - protein, 21 aa, Artificial sequence
  synthetic peptide
KVRGMNLTVFGGTVTAFLGIP

SEQ ID NO: 8898 - protein, 21 aa, Artificial sequence
  synthetic peptide
VRGMNLTVFGGTVTAFLGIPY

SEQ ID NO: 8899 - protein, 21 aa, Artificial sequence
  synthetic peptide
RGMNLTVFGGTVTAFLGIPYA

SEQ ID NO: 8900 - protein, 21 aa, Artificial sequence
  synthetic peptide
GMNLTVFGGTVTAFLGIPYAQ

SEQ ID NO: 8901 - protein, 21 aa, Artificial sequence
  synthetic peptide
MNLTVFGGTVTAFLGIPYAQP

SEQ ID NO: 8902 - protein, 21 aa, Artificial sequence
  synthetic peptide
NLTVFGGTVTAFLGIPYAQPP

SEQ ID NO: 8903 - protein, 21 aa, Artificial sequence
  synthetic peptide
LTVFGGTVTAFLGIPYAQPPL

SEQ ID NO: 8904 - protein, 21 aa, Artificial sequence
  synthetic peptide
TVFGGTVTAFLGIPYAQPPLG

SEQ ID NO: 8905 - protein, 21 aa, Artificial sequence
  synthetic peptide
VFGGTVTAFLGIPYAQPPLGR

SEQ ID NO: 8906 - protein, 21 aa, Artificial sequence
  synthetic peptide
FGGTVTAFLGIPYAQPPLGRL

SEQ ID NO: 8907 - protein, 21 aa, Artificial sequence
  synthetic peptide
GGTVTAFLGIPYAQPPLGRLR

SEQ ID NO: 8908 - protein, 21 aa, Artificial sequence
  synthetic peptide
GTVTAFLGIPYAQPPLGRLRF

SEQ ID NO: 8909 - protein, 21 aa, Artificial sequence
  synthetic peptide
TVTAFLGIPYAQPPLGRLRFK

SEQ ID NO: 8910 - protein, 21 aa, Artificial sequence
  synthetic peptide
VTAFLGIPYAQPPLGRLRFKK

SEQ ID NO: 8911 - protein, 21 aa, Artificial sequence
  synthetic peptide
TAFLGIPYAQPPLGRLRFKKP

SEQ ID NO: 8912 - protein, 21 aa, Artificial sequence
  synthetic peptide
AFLGIPYAQPPLGRLRFKKPQ

SEQ ID NO: 8913 - protein, 21 aa, Artificial sequence
  synthetic peptide
FLGIPYAQPPLGRLRFKKPQS

SEQ ID NO: 8914 - protein, 21 aa, Artificial sequence
  synthetic peptide
LGIPYAQPPLGRLRFKKPQSL

SEQ ID NO: 8915 - protein, 21 aa, Artificial sequence
  synthetic peptide
GIPYAQPPLGRLRFKKPQSLT

SEQ ID NO: 8916 - protein, 21 aa, Artificial sequence
  synthetic peptide
IPYAQPPLGRLRFKKPQSLTK

SEQ ID NO: 8917 - protein, 21 aa, Artificial sequence
  synthetic peptide
PYAQPPLGRLRFKKPQSLTKW

SEQ ID NO: 8918 - protein, 21 aa, Artificial sequence
  synthetic peptide
YAQPPLGRLRFKKPQSLTKWS

SEQ ID NO: 8919 - protein, 21 aa, Artificial sequence
  synthetic peptide
AQPPLGRLRFKKPQSLTKWSD

SEQ ID NO: 8920 - protein, 21 aa, Artificial sequence
  synthetic peptide
QPPLGRLRFKKPQSLTKWSDI

SEQ ID NO: 8921 - protein, 21 aa, Artificial sequence
  synthetic peptide
PPLGRLRFKKPQSLTKWSDIW

SEQ ID NO: 8922 - protein, 21 aa, Artificial sequence
  synthetic peptide
PLGRLRFKKPQSLTKWSDIWN

SEQ ID NO: 8923 - protein, 21 aa, Artificial sequence
  synthetic peptide
LGRLRFKKPQSLTKWSDIWNA

SEQ ID NO: 8924 - protein, 21 aa, Artificial sequence
  synthetic peptide
GRLRFKKPQSLTKWSDIWNAT

SEQ ID NO: 8925 - protein, 21 aa, Artificial sequence
  synthetic peptide
RLRFKKPQSLTKWSDIWNATK

SEQ ID NO: 8926 - protein, 21 aa, Artificial sequence
  synthetic peptide
LRFKKPQSLTKWSDIWNATKY

SEQ ID NO: 8927 - protein, 21 aa, Artificial sequence
  synthetic peptide
RFKKPQSLTKWSDIWNATKYA

SEQ ID NO: 8928 - protein, 21 aa, Artificial sequence
  synthetic peptide
FKKPQSLTKWSDIWNATKYAN

SEQ ID NO: 8929 - protein, 21 aa, Artificial sequence
  synthetic peptide
KKPQSLTKWSDIWNATKYANS

SEQ ID NO: 8930 - protein, 21 aa, Artificial sequence
  synthetic peptide
KPQSLTKWSDIWNATKYANSC

SEQ ID NO: 8931 - protein, 21 aa, Artificial sequence
  synthetic peptide
PQSLTKWSDIWNATKYANSCC

SEQ ID NO: 8932 - protein, 21 aa, Artificial sequence
  synthetic peptide
QSLTKWSDIWNATKYANSCCQ

SEQ ID NO: 8933 - protein, 21 aa, Artificial sequence
  synthetic peptide
SLTKWSDIWNATKYANSCCQN

SEQ ID NO: 8934 - protein, 21 aa, Artificial sequence
  synthetic peptide
LTKWSDIWNATKYANSCCQNI

SEQ ID NO: 8935 - protein, 21 aa, Artificial sequence
  synthetic peptide
TKWSDIWNATKYANSCCQNID

SEQ ID NO: 8936 - protein, 21 aa, Artificial sequence
  synthetic peptide
KWSDIWNATKYANSCCQNIDQ

SEQ ID NO: 8937 - protein, 21 aa, Artificial sequence
  synthetic peptide
WSDIWNATKYANSCCQNIDQS

SEQ ID NO: 8938 - protein, 21 aa, Artificial sequence
  synthetic peptide
SDIWNATKYANSCCQNIDQSF

SEQ ID NO: 8939 - protein, 21 aa, Artificial sequence
  synthetic peptide
DIWNATKYANSCCQNIDQSFP

SEQ ID NO: 8940 - protein, 21 aa, Artificial sequence
  synthetic peptide
IWNATKYANSCCQNIDQSFPG

SEQ ID NO: 8941 - protein, 21 aa, Artificial sequence
  synthetic peptide
WNATKYANSCCQNIDQSFPGF

SEQ ID NO: 8942 - protein, 21 aa, Artificial sequence
  synthetic peptide
NATKYANSCCQNIDQSFPGFH

SEQ ID NO: 8943 - protein, 21 aa, Artificial sequence
  synthetic peptide
ATKYANSCCQNIDQSFPGFHG

SEQ ID NO: 8944 - protein, 21 aa, Artificial sequence
  synthetic peptide
TKYANSCCQNIDQSFPGFHGS

SEQ ID NO: 8945 - protein, 21 aa, Artificial sequence
  synthetic peptide
KYANSCCQNIDQSFPGFHGSE

SEQ ID NO: 8946 - protein, 21 aa, Artificial sequence
  synthetic peptide
YANSCCQNIDQSFPGFHGSEM

SEQ ID NO: 8947 - protein, 21 aa, Artificial sequence
  synthetic peptide
ANSCCQNIDQSFPGFHGSEMW

SEQ ID NO: 8948 - protein, 21 aa, Artificial sequence
  synthetic peptide
NSCCQNIDQSFPGFHGSEMWN

SEQ ID NO: 8949 - protein, 21 aa, Artificial sequence
  synthetic peptide
SCCQNIDQSFPGFHGSEMWNP

SEQ ID NO: 8950 - protein, 21 aa, Artificial sequence
  synthetic peptide
CCQNIDQSFPGFHGSEMWNPN

SEQ ID NO: 8951 - protein, 21 aa, Artificial sequence
  synthetic peptide
CQNIDQSFPGFHGSEMWNPNT

SEQ ID NO: 8952 - protein, 21 aa, Artificial sequence
  synthetic peptide
QNIDQSFPGFHGSEMWNPNTD

SEQ ID NO: 8953 - protein, 21 aa, Artificial sequence
  synthetic peptide
NIDQSFPGFHGSEMWNPNTDL

SEQ ID NO: 8954 - protein, 21 aa, Artificial sequence
  synthetic peptide
IDQSFPGFHGSEMWNPNTDLS

SEQ ID NO: 8955 - protein, 21 aa, Artificial sequence
  synthetic peptide
DQSFPGFHGSEMWNPNTDLSE

SEQ ID NO: 8956 - protein, 21 aa, Artificial sequence
  synthetic peptide
QSFPGFHGSEMWNPNTDLSED

SEQ ID NO: 8957 - protein, 21 aa, Artificial sequence
  synthetic peptide
SFPGFHGSEMWNPNTDLSEDC

SEQ ID NO: 8958 - protein, 21 aa, Artificial sequence
  synthetic peptide
FPGFHGSEMWNPNTDLSEDCL

SEQ ID NO: 8959 - protein, 21 aa, Artificial sequence
  synthetic peptide
PGFHGSEMWNPNTDLSEDCLY

SEQ ID NO: 8960 - protein, 21 aa, Artificial sequence
  synthetic peptide
GFHGSEMWNPNTDLSEDCLYL

SEQ ID NO: 8961 - protein, 21 aa, Artificial sequence
  synthetic peptide
FHGSEMWNPNTDLSEDCLYLN

SEQ ID NO: 8962 - protein, 21 aa, Artificial sequence
  synthetic peptide
HGSEMWNPNTDLSEDCLYLNV

SEQ ID NO: 8963 - protein, 21 aa, Artificial sequence
  synthetic peptide
GSEMWNPNTDLSEDCLYLNVW

SEQ ID NO: 8964 - protein, 21 aa, Artificial sequence
  synthetic peptide
SEMWNPNTDLSEDCLYLNVWI

SEQ ID NO: 8965 - protein, 21 aa, Artificial sequence
  synthetic peptide
EMWNPNTDLSEDCLYLNVWIP

SEQ ID NO: 8966 - protein, 21 aa, Artificial sequence
  synthetic peptide
MWNPNTDLSEDCLYLNVWIPA

SEQ ID NO: 8967 - protein, 21 aa, Artificial sequence
  synthetic peptide
WNPNTDLSEDCLYLNVWIPAP

SEQ ID NO: 8968 - protein, 21 aa, Artificial sequence
  synthetic peptide
NPNTDLSEDCLYLNVWIPAPK

SEQ ID NO: 8969 - protein, 21 aa, Artificial sequence
  synthetic peptide
PNTDLSEDCLYLNVWIPAPKP

SEQ ID NO: 8970 - protein, 21 aa, Artificial sequence
  synthetic peptide
NTDLSEDCLYLNVWIPAPKPK

SEQ ID NO: 8971 - protein, 21 aa, Artificial sequence
  synthetic peptide
TDLSEDCLYLNVWIPAPKPKN

SEQ ID NO: 8972 - protein, 21 aa, Artificial sequence
  synthetic peptide
DLSEDCLYLNVWIPAPKPKNA

SEQ ID NO: 8973 - protein, 21 aa, Artificial sequence
  synthetic peptide
LSEDCLYLNVWIPAPKPKNAT

SEQ ID NO: 8974 - protein, 21 aa, Artificial sequence
  synthetic peptide
SEDCLYLNVWIPAPKPKNATV

SEQ ID NO: 8975 - protein, 21 aa, Artificial sequence
  synthetic peptide
EDCLYLNVWIPAPKPKNATVL

SEQ ID NO: 8976 - protein, 21 aa, Artificial sequence
  synthetic peptide
DCLYLNVWIPAPKPKNATVLI

SEQ ID NO: 8977 - protein, 21 aa, Artificial sequence
  synthetic peptide
CLYLNVWIPAPKPKNATVLIW

SEQ ID NO: 8978 - protein, 21 aa, Artificial sequence
  synthetic peptide
LYLNVWIPAPKPKNATVLIWI

SEQ ID NO: 8979 - protein, 21 aa, Artificial sequence
  synthetic peptide
YLNVWIPAPKPKNATVLIWIY

SEQ ID NO: 8980 - protein, 21 aa, Artificial sequence
  synthetic peptide
LNVWIPAPKPKNATVLIWIYG

SEQ ID NO: 8981 - protein, 21 aa, Artificial sequence
  synthetic peptide
NVWIPAPKPKNATVLIWIYGG

SEQ ID NO: 8982 - protein, 21 aa, Artificial sequence
  synthetic peptide
VWIPAPKPKNATVLIWIYGGG

SEQ ID NO: 8983 - protein, 21 aa, Artificial sequence
  synthetic peptide
WIPAPKPKNATVLIWIYGGGF

SEQ ID NO: 8984 - protein, 21 aa, Artificial sequence
  synthetic peptide
IPAPKPKNATVLIWIYGGGFQ

SEQ ID NO: 8985 - protein, 21 aa, Artificial sequence
  synthetic peptide
PAPKPKNATVLIWIYGGGFQT

SEQ ID NO: 8986 - protein, 21 aa, Artificial sequence
  synthetic peptide
APKPKNATVLIWIYGGGFQTG

SEQ ID NO: 8987 - protein, 21 aa, Artificial sequence
  synthetic peptide
PKPKNATVLIWIYGGGFQTGT

SEQ ID NO: 8988 - protein, 21 aa, Artificial sequence
  synthetic peptide
KPKNATVLIWIYGGGFQTGTS

SEQ ID NO: 8989 - protein, 21 aa, Artificial sequence
  synthetic peptide
PKNATVLIWIYGGGFQTGTSS

SEQ ID NO: 8990 - protein, 21 aa, Artificial sequence
  synthetic peptide
KNATVLIWIYGGGFQTGTSSL

SEQ ID NO: 8991 - protein, 21 aa, Artificial sequence
  synthetic peptide
NATVLIWIYGGGFQTGTSSLH

SEQ ID NO: 8992 - protein, 21 aa, Artificial sequence
  synthetic peptide
ATVLIWIYGGGFQTGTSSLHV

SEQ ID NO: 8993 - protein, 21 aa, Artificial sequence
  synthetic peptide
TVLIWIYGGGFQTGTSSLHVY

SEQ ID NO: 8994 - protein, 21 aa, Artificial sequence
  synthetic peptide
VLIWIYGGGFQTGTSSLHVYD

SEQ ID NO: 8995 - protein, 21 aa, Artificial sequence
  synthetic peptide
LIWIYGGGFQTGTSSLHVYDG

SEQ ID NO: 8996 - protein, 21 aa, Artificial sequence
  synthetic peptide
IWIYGGGFQTGTSSLHVYDGK

SEQ ID NO: 8997 - protein, 21 aa, Artificial sequence
  synthetic peptide
WIYGGGFQTGTSSLHVYDGKF

SEQ ID NO: 8998 - protein, 21 aa, Artificial sequence
  synthetic peptide
IYGGGFQTGTSSLHVYDGKFL

SEQ ID NO: 8999 - protein, 21 aa, Artificial sequence
  synthetic peptide
YGGGFQTGTSSLHVYDGKFLA

SEQ ID NO: 9000 - protein, 21 aa, Artificial sequence
  synthetic peptide
GGGFQTGTSSLHVYDGKFLAR

SEQ ID NO: 9001 - protein, 21 aa, Artificial sequence
  synthetic peptide
GGFQTGTSSLHVYDGKFLARV

SEQ ID NO: 9002 - protein, 21 aa, Artificial sequence
  synthetic peptide
GFQTGTSSLHVYDGKFLARVE

SEQ ID NO: 9003 - protein, 21 aa, Artificial sequence
  synthetic peptide
FQTGTSSLHVYDGKFLARVER

SEQ ID NO: 9004 - protein, 21 aa, Artificial sequence
  synthetic peptide
QTGTSSLHVYDGKFLARVERV

SEQ ID NO: 9005 - protein, 21 aa, Artificial sequence
  synthetic peptide
TGTSSLHVYDGKFLARVERVI

SEQ ID NO: 9006 - protein, 21 aa, Artificial sequence
  synthetic peptide
GTSSLHVYDGKFLARVERVIV

SEQ ID NO: 9007 - protein, 21 aa, Artificial sequence
  synthetic peptide
TSSLHVYDGKFLARVERVIVV

SEQ ID NO: 9008 - protein, 21 aa, Artificial sequence
  synthetic peptide
SSLHVYDGKFLARVERVIVVS

SEQ ID NO: 9009 - protein, 21 aa, Artificial sequence
  synthetic peptide
SLHVYDGKFLARVERVIVVSM

SEQ ID NO: 9010 - protein, 21 aa, Artificial sequence
  synthetic peptide
LHVYDGKFLARVERVIVVSMN

SEQ ID NO: 9011 - protein, 21 aa, Artificial sequence
  synthetic peptide
HVYDGKFLARVERVIVVSMNY

SEQ ID NO: 9012 - protein, 21 aa, Artificial sequence
  synthetic peptide
VYDGKFLARVERVIVVSMNYR

SEQ ID NO: 9013 - protein, 21 aa, Artificial sequence
  synthetic peptide
YDGKFLARVERVIVVSMNYRV

SEQ ID NO: 9014 - protein, 21 aa, Artificial sequence
  synthetic peptide
DGKFLARVERVIVVSMNYRVG

SEQ ID NO: 9015 - protein, 21 aa, Artificial sequence
  synthetic peptide
GKFLARVERVIVVSMNYRVGA

SEQ ID NO: 9016 - protein, 21 aa, Artificial sequence
  synthetic peptide
KFLARVERVIVVSMNYRVGAL

SEQ ID NO: 9017 - protein, 21 aa, Artificial sequence
  synthetic peptide
FLARVERVIVVSMNYRVGALG

SEQ ID NO: 9018 - protein, 21 aa, Artificial sequence
  synthetic peptide
LARVERVIVVSMNYRVGALGF

SEQ ID NO: 9019 - protein, 21 aa, Artificial sequence
  synthetic peptide
ARVERVIVVSMNYRVGALGFL

SEQ ID NO: 9020 - protein, 21 aa, Artificial sequence
  synthetic peptide
RVERVIVVSMNYRVGALGFLA

SEQ ID NO: 9021 - protein, 21 aa, Artificial sequence
  synthetic peptide
VERVIVVSMNYRVGALGFLAL

SEQ ID NO: 9022 - protein, 21 aa, Artificial sequence
  synthetic peptide
ERVIVVSMNYRVGALGFLALP

SEQ ID NO: 9023 - protein, 21 aa, Artificial sequence
  synthetic peptide
RVIVVSMNYRVGALGFLALPG

SEQ ID NO: 9024 - protein, 21 aa, Artificial sequence
  synthetic peptide
VIVVSMNYRVGALGFLALPGN

SEQ ID NO: 9025 - protein, 21 aa, Artificial sequence
  synthetic peptide
IVVSMNYRVGALGFLALPGNP

SEQ ID NO: 9026 - protein, 21 aa, Artificial sequence
  synthetic peptide
VVSMNYRVGALGFLALPGNPE

SEQ ID NO: 9027 - protein, 21 aa, Artificial sequence
  synthetic peptide
VSMNYRVGALGFLALPGNPEA

SEQ ID NO: 9028 - protein, 21 aa, Artificial sequence
  synthetic peptide
SMNYRVGALGFLALPGNPEAP

SEQ ID NO: 9029 - protein, 21 aa, Artificial sequence
  synthetic peptide
MNYRVGALGFLALPGNPEAPG

SEQ ID NO: 9030 - protein, 21 aa, Artificial sequence
  synthetic peptide
NYRVGALGFLALPGNPEAPGN

SEQ ID NO: 9031 - protein, 21 aa, Artificial sequence
  synthetic peptide
YRVGALGFLALPGNPEAPGNM

SEQ ID NO: 9032 - protein, 21 aa, Artificial sequence
  synthetic peptide
RVGALGFLALPGNPEAPGNMG

SEQ ID NO: 9033 - protein, 21 aa, Artificial sequence
  synthetic peptide
VGALGFLALPGNPEAPGNMGL

SEQ ID NO: 9034 - protein, 21 aa, Artificial sequence
  synthetic peptide
GALGFLALPGNPEAPGNMGLF

SEQ ID NO: 9035 - protein, 21 aa, Artificial sequence
  synthetic peptide
ALGFLALPGNPEAPGNMGLFD

SEQ ID NO: 9036 - protein, 21 aa, Artificial sequence
  synthetic peptide
LGFLALPGNPEAPGNMGLFDQ

SEQ ID NO: 9037 - protein, 21 aa, Artificial sequence
  synthetic peptide
GFLALPGNPEAPGNMGLFDQQ

SEQ ID NO: 9038 - protein, 21 aa, Artificial sequence
  synthetic peptide
FLALPGNPEAPGNMGLFDQQL

SEQ ID NO: 9039 - protein, 21 aa, Artificial sequence
  synthetic peptide
LALPGNPEAPGNMGLFDQQLA

SEQ ID NO: 9040 - protein, 21 aa, Artificial sequence
  synthetic peptide
ALPGNPEAPGNMGLFDQQLAL

SEQ ID NO: 9041 - protein, 21 aa, Artificial sequence
  synthetic peptide
LPGNPEAPGNMGLFDQQLALQ

SEQ ID NO: 9042 - protein, 21 aa, Artificial sequence
  synthetic peptide
PGNPEAPGNMGLFDQQLALQW

SEQ ID NO: 9043 - protein, 21 aa, Artificial sequence
  synthetic peptide
GNPEAPGNMGLFDQQLALQWV

SEQ ID NO: 9044 - protein, 21 aa, Artificial sequence
  synthetic peptide
NPEAPGNMGLFDQQLALQWVQ

SEQ ID NO: 9045 - protein, 21 aa, Artificial sequence
  synthetic peptide
PEAPGNMGLFDQQLALQWVQK

SEQ ID NO: 9046 - protein, 21 aa, Artificial sequence
  synthetic peptide
EAPGNMGLFDQQLALQWVQKN

SEQ ID NO: 9047 - protein, 21 aa, Artificial sequence
  synthetic peptide
APGNMGLFDQQLALQWVQKNI

SEQ ID NO: 9048 - protein, 21 aa, Artificial sequence
  synthetic peptide
PGNMGLFDQQLALQWVQKNIA

SEQ ID NO: 9049 - protein, 21 aa, Artificial sequence
  synthetic peptide
GNMGLFDQQLALQWVQKNIAA

SEQ ID NO: 9050 - protein, 21 aa, Artificial sequence
  synthetic peptide
NMGLFDQQLALQWVQKNIAAF

SEQ ID NO: 9051 - protein, 21 aa, Artificial sequence
  synthetic peptide
MGLFDQQLALQWVQKNIAAFG

SEQ ID NO: 9052 - protein, 21 aa, Artificial sequence
  synthetic peptide
GLFDQQLALQWVQKNIAAFGG

SEQ ID NO: 9053 - protein, 21 aa, Artificial sequence
  synthetic peptide
LFDQQLALQWVQKNIAAFGGN

SEQ ID NO: 9054 - protein, 21 aa, Artificial sequence
  synthetic peptide
FDQQLALQWVQKNIAAFGGNP

SEQ ID NO: 9055 - protein, 21 aa, Artificial sequence
  synthetic peptide
DQQLALQWVQKNIAAFGGNPK

SEQ ID NO: 9056 - protein, 21 aa, Artificial sequence
  synthetic peptide
QQLALQWVQKNIAAFGGNPKS

SEQ ID NO: 9057 - protein, 21 aa, Artificial sequence
  synthetic peptide
QLALQWVQKNIAAFGGNPKSV

SEQ ID NO: 9058 - protein, 21 aa, Artificial sequence
  synthetic peptide
LALQWVQKNIAAFGGNPKSVT

SEQ ID NO: 9059 - protein, 21 aa, Artificial sequence
  synthetic peptide
ALQWVQKNIAAFGGNPKSVTL

SEQ ID NO: 9060 - protein, 21 aa, Artificial sequence
  synthetic peptide
LQWVQKNIAAFGGNPKSVTLF

SEQ ID NO: 9061 - protein, 21 aa, Artificial sequence
  synthetic peptide
QWVQKNIAAFGGNPKSVTLFG

SEQ ID NO: 9062 - protein, 21 aa, Artificial sequence
  synthetic peptide
WVQKNIAAFGGNPKSVTLFGE

SEQ ID NO: 9063 - protein, 21 aa, Artificial sequence
  synthetic peptide
VQKNIAAFGGNPKSVTLFGES

SEQ ID NO: 9064 - protein, 21 aa, Artificial sequence
  synthetic peptide
QKNIAAFGGNPKSVTLFGESA

SEQ ID NO: 9065 - protein, 21 aa, Artificial sequence
  synthetic peptide
KNIAAFGGNPKSVTLFGESAG

SEQ ID NO: 9066 - protein, 21 aa, Artificial sequence
  synthetic peptide
NIAAFGGNPKSVTLFGESAGA

SEQ ID NO: 9067 - protein, 21 aa, Artificial sequence
  synthetic peptide
IAAFGGNPKSVTLFGESAGAA

SEQ ID NO: 9068 - protein, 21 aa, Artificial sequence
  synthetic peptide
AAFGGNPKSVTLFGESAGAAS

SEQ ID NO: 9069 - protein, 21 aa, Artificial sequence
  synthetic peptide
AFGGNPKSVTLFGESAGAASV

SEQ ID NO: 9070 - protein, 21 aa, Artificial sequence
  synthetic peptide
FGGNPKSVTLFGESAGAASVS

SEQ ID NO: 9071 - protein, 21 aa, Artificial sequence
  synthetic peptide
GGNPKSVTLFGESAGAASVSL

SEQ ID NO: 9072 - protein, 21 aa, Artificial sequence
  synthetic peptide
GNPKSVTLFGESAGAASVSLH

SEQ ID NO: 9073 - protein, 21 aa, Artificial sequence
  synthetic peptide
NPKSVTLFGESAGAASVSLHL

SEQ ID NO: 9074 - protein, 21 aa, Artificial sequence
  synthetic peptide
PKSVTLFGESAGAASVSLHLL

SEQ ID NO: 9075 - protein, 21 aa, Artificial sequence
  synthetic peptide
KSVTLFGESAGAASVSLHLLS

SEQ ID NO: 9076 - protein, 21 aa, Artificial sequence
  synthetic peptide
SVTLFGESAGAASVSLHLLSP

SEQ ID NO: 9077 - protein, 21 aa, Artificial sequence
  synthetic peptide
VTLFGESAGAASVSLHLLSPG

SEQ ID NO: 9078 - protein, 21 aa, Artificial sequence
  synthetic peptide
TLFGESAGAASVSLHLLSPGS

SEQ ID NO: 9079 - protein, 21 aa, Artificial sequence
  synthetic peptide
LFGESAGAASVSLHLLSPGSH

SEQ ID NO: 9080 - protein, 21 aa, Artificial sequence
  synthetic peptide
FGESAGAASVSLHLLSPGSHS

SEQ ID NO: 9081 - protein, 21 aa, Artificial sequence
  synthetic peptide
GESAGAASVSLHLLSPGSHSL

SEQ ID NO: 9082 - protein, 21 aa, Artificial sequence
  synthetic peptide
ESAGAASVSLHLLSPGSHSLF

SEQ ID NO: 9083 - protein, 21 aa, Artificial sequence
  synthetic peptide
SAGAASVSLHLLSPGSHSLFT

SEQ ID NO: 9084 - protein, 21 aa, Artificial sequence
  synthetic peptide
AGAASVSLHLLSPGSHSLFTR

SEQ ID NO: 9085 - protein, 21 aa, Artificial sequence
  synthetic peptide
GAASVSLHLLSPGSHSLFTRA

SEQ ID NO: 9086 - protein, 21 aa, Artificial sequence
  synthetic peptide
AASVSLHLLSPGSHSLFTRAI

SEQ ID NO: 9087 - protein, 21 aa, Artificial sequence
  synthetic peptide
ASVSLHLLSPGSHSLFTRAIL

SEQ ID NO: 9088 - protein, 21 aa, Artificial sequence
  synthetic peptide
SVSLHLLSPGSHSLFTRAILQ

SEQ ID NO: 9089 - protein, 21 aa, Artificial sequence
  synthetic peptide
VSLHLLSPGSHSLFTRAILQS

SEQ ID NO: 9090 - protein, 21 aa, Artificial sequence
  synthetic peptide
SLHLLSPGSHSLFTRAILQSG

SEQ ID NO: 9091 - protein, 21 aa, Artificial sequence
  synthetic peptide
LHLLSPGSHSLFTRAILQSGS

SEQ ID NO: 9092 - protein, 21 aa, Artificial sequence
  synthetic peptide
HLLSPGSHSLFTRAILQSGSF

SEQ ID NO: 9093 - protein, 21 aa, Artificial sequence
  synthetic peptide
LLSPGSHSLFTRAILQSGSFN

SEQ ID NO: 9094 - protein, 21 aa, Artificial sequence
  synthetic peptide
LSPGSHSLFTRAILQSGSFNA

SEQ ID NO: 9095 - protein, 21 aa, Artificial sequence
  synthetic peptide
SPGSHSLFTRAILQSGSFNAP

SEQ ID NO: 9096 - protein, 21 aa, Artificial sequence
  synthetic peptide
PGSHSLFTRAILQSGSFNAPW

SEQ ID NO: 9097 - protein, 21 aa, Artificial sequence
  synthetic peptide
GSHSLFTRAILQSGSFNAPWA

SEQ ID NO: 9098 - protein, 21 aa, Artificial sequence
  synthetic peptide
SHSLFTRAILQSGSFNAPWAV

SEQ ID NO: 9099 - protein, 21 aa, Artificial sequence
  synthetic peptide
HSLFTRAILQSGSFNAPWAVT

SEQ ID NO: 9100 - protein, 21 aa, Artificial sequence
  synthetic peptide
SLFTRAILQSGSFNAPWAVTS

SEQ ID NO: 9101 - protein, 21 aa, Artificial sequence
  synthetic peptide
LFTRAILQSGSFNAPWAVTSL

SEQ ID NO: 9102 - protein, 21 aa, Artificial sequence
  synthetic peptide
FTRAILQSGSFNAPWAVTSLY

SEQ ID NO: 9103 - protein, 21 aa, Artificial sequence
  synthetic peptide
TRAILQSGSFNAPWAVTSLYE

SEQ ID NO: 9104 - protein, 21 aa, Artificial sequence
  synthetic peptide
RAILQSGSFNAPWAVTSLYEA

SEQ ID NO: 9105 - protein, 21 aa, Artificial sequence
  synthetic peptide
AILQSGSFNAPWAVTSLYEAR

SEQ ID NO: 9106 - protein, 21 aa, Artificial sequence
  synthetic peptide
ILQSGSFNAPWAVTSLYEARN

SEQ ID NO: 9107 - protein, 21 aa, Artificial sequence
  synthetic peptide
LQSGSFNAPWAVTSLYEARNR

SEQ ID NO: 9108 - protein, 21 aa, Artificial sequence
  synthetic peptide
QSGSFNAPWAVTSLYEARNRT

SEQ ID NO: 9109 - protein, 21 aa, Artificial sequence
  synthetic peptide
SGSFNAPWAVTSLYEARNRTL

SEQ ID NO: 9110 - protein, 21 aa, Artificial sequence
  synthetic peptide
GSFNAPWAVTSLYEARNRTLN

SEQ ID NO: 9111 - protein, 21 aa, Artificial sequence
  synthetic peptide
SFNAPWAVTSLYEARNRTLNL

SEQ ID NO: 9112 - protein, 21 aa, Artificial sequence
  synthetic peptide
FNAPWAVTSLYEARNRTLNLA

SEQ ID NO: 9113 - protein, 21 aa, Artificial sequence
  synthetic peptide
NAPWAVTSLYEARNRTLNLAK

SEQ ID NO: 9114 - protein, 21 aa, Artificial sequence
  synthetic peptide
APWAVTSLYEARNRTLNLAKL

SEQ ID NO: 9115 - protein, 21 aa, Artificial sequence
  synthetic peptide
PWAVTSLYEARNRTLNLAKLT

SEQ ID NO: 9116 - protein, 21 aa, Artificial sequence
  synthetic peptide
WAVTSLYEARNRTLNLAKLTG

SEQ ID NO: 9117 - protein, 21 aa, Artificial sequence
  synthetic peptide
AVTSLYEARNRTLNLAKLTGC

SEQ ID NO: 9118 - protein, 21 aa, Artificial sequence
  synthetic peptide
VTSLYEARNRTLNLAKLTGCS

SEQ ID NO: 9119 - protein, 21 aa, Artificial sequence
  synthetic peptide
TSLYEARNRTLNLAKLTGCSR

SEQ ID NO: 9120 - protein, 21 aa, Artificial sequence
  synthetic peptide
SLYEARNRTLNLAKLTGCSRE

SEQ ID NO: 9121 - protein, 21 aa, Artificial sequence
  synthetic peptide
LYEARNRTLNLAKLTGCSREN

SEQ ID NO: 9122 - protein, 21 aa, Artificial sequence
  synthetic peptide
YEARNRTLNLAKLTGCSRENE

SEQ ID NO: 9123 - protein, 21 aa, Artificial sequence
  synthetic peptide
EARNRTLNLAKLTGCSRENET

SEQ ID NO: 9124 - protein, 21 aa, Artificial sequence
  synthetic peptide
ARNRTLNLAKLTGCSRENETE

SEQ ID NO: 9125 - protein, 21 aa, Artificial sequence
  synthetic peptide
RNRTLNLAKLTGCSRENETEI

SEQ ID NO: 9126 - protein, 21 aa, Artificial sequence
  synthetic peptide
NRTLNLAKLTGCSRENETEII

SEQ ID NO: 9127 - protein, 21 aa, Artificial sequence
  synthetic peptide
RTLNLAKLTGCSRENETEIIK

SEQ ID NO: 9128 - protein, 21 aa, Artificial sequence
  synthetic peptide
TLNLAKLTGCSRENETEIIKC

SEQ ID NO: 9129 - protein, 21 aa, Artificial sequence
  synthetic peptide
LNLAKLTGCSRENETEIIKCL

SEQ ID NO: 9130 - protein, 21 aa, Artificial sequence
  synthetic peptide
NLAKLTGCSRENETEIIKCLR

SEQ ID NO: 9131 - protein, 21 aa, Artificial sequence
  synthetic peptide
LAKLTGCSRENETEIIKCLRN

SEQ ID NO: 9132 - protein, 21 aa, Artificial sequence
  synthetic peptide
AKLTGCSRENETEIIKCLRNK

SEQ ID NO: 9133 - protein, 21 aa, Artificial sequence
  synthetic peptide
KLTGCSRENETEIIKCLRNKD

SEQ ID NO: 9134 - protein, 21 aa, Artificial sequence
  synthetic peptide
LTGCSRENETEIIKCLRNKDP

SEQ ID NO: 9135 - protein, 21 aa, Artificial sequence
  synthetic peptide
TGCSRENETEIIKCLRNKDPQ

SEQ ID NO: 9136 - protein, 21 aa, Artificial sequence
  synthetic peptide
GCSRENETEIIKCLRNKDPQE

SEQ ID NO: 9137 - protein, 21 aa, Artificial sequence
  synthetic peptide
CSRENETEIIKCLRNKDPQEI

SEQ ID NO: 9138 - protein, 21 aa, Artificial sequence
  synthetic peptide
SRENETEIIKCLRNKDPQEIL

SEQ ID NO: 9139 - protein, 21 aa, Artificial sequence
  synthetic peptide
RENETEIIKCLRNKDPQEILL

SEQ ID NO: 9140 - protein, 21 aa, Artificial sequence
  synthetic peptide
ENETEIIKCLRNKDPQEILLN

SEQ ID NO: 9141 - protein, 21 aa, Artificial sequence
  synthetic peptide
NETEIIKCLRNKDPQEILLNE

SEQ ID NO: 9142 - protein, 21 aa, Artificial sequence
  synthetic peptide
ETEIIKCLRNKDPQEILLNEA

SEQ ID NO: 9143 - protein, 21 aa, Artificial sequence
  synthetic peptide
TEIIKCLRNKDPQEILLNEAF

SEQ ID NO: 9144 - protein, 21 aa, Artificial sequence
  synthetic peptide
EIIKCLRNKDPQEILLNEAFV

SEQ ID NO: 9145 - protein, 21 aa, Artificial sequence
  synthetic peptide
IIKCLRNKDPQEILLNEAFVV

SEQ ID NO: 9146 - protein, 21 aa, Artificial sequence
  synthetic peptide
IKCLRNKDPQEILLNEAFVVP

SEQ ID NO: 9147 - protein, 21 aa, Artificial sequence
  synthetic peptide
KCLRNKDPQEILLNEAFVVPY

SEQ ID NO: 9148 - protein, 21 aa, Artificial sequence
  synthetic peptide
CLRNKDPQEILLNEAFVVPYG

SEQ ID NO: 9149 - protein, 21 aa, Artificial sequence
  synthetic peptide
LRNKDPQEILLNEAFVVPYGT

SEQ ID NO: 9150 - protein, 21 aa, Artificial sequence
  synthetic peptide
RNKDPQEILLNEAFVVPYGTP

SEQ ID NO: 9151 - protein, 21 aa, Artificial sequence
  synthetic peptide
NKDPQEILLNEAFVVPYGTPL

SEQ ID NO: 9152 - protein, 21 aa, Artificial sequence
  synthetic peptide
KDPQEILLNEAFVVPYGTPLS

SEQ ID NO: 9153 - protein, 21 aa, Artificial sequence
  synthetic peptide
DPQEILLNEAFVVPYGTPLSV

SEQ ID NO: 9154 - protein, 21 aa, Artificial sequence
  synthetic peptide
PQEILLNEAFVVPYGTPLSVN

SEQ ID NO: 9155 - protein, 21 aa, Artificial sequence
  synthetic peptide
QEILLNEAFVVPYGTPLSVNF

SEQ ID NO: 9156 - protein, 21 aa, Artificial sequence
  synthetic peptide
EILLNEAFVVPYGTPLSVNFG

SEQ ID NO: 9157 - protein, 21 aa, Artificial sequence
  synthetic peptide
ILLNEAFVVPYGTPLSVNFGP

SEQ ID NO: 9158 - protein, 21 aa, Artificial sequence
  synthetic peptide
LLNEAFVVPYGTPLSVNFGPT

SEQ ID NO: 9159 - protein, 21 aa, Artificial sequence
  synthetic peptide
LNEAFVVPYGTPLSVNFGPTV

SEQ ID NO: 9160 - protein, 21 aa, Artificial sequence
  synthetic peptide
NEAFVVPYGTPLSVNFGPTVD

SEQ ID NO: 9161 - protein, 21 aa, Artificial sequence
  synthetic peptide
EAFVVPYGTPLSVNFGPTVDG

SEQ ID NO: 9162 - protein, 21 aa, Artificial sequence
  synthetic peptide
AFVVPYGTPLSVNFGPTVDGD

SEQ ID NO: 9163 - protein, 21 aa, Artificial sequence
  synthetic peptide
FVVPYGTPLSVNFGPTVDGDF

SEQ ID NO: 9164 - protein, 21 aa, Artificial sequence
  synthetic peptide
VVPYGTPLSVNFGPTVDGDFL

SEQ ID NO: 9165 - protein, 21 aa, Artificial sequence
  synthetic peptide
VPYGTPLSVNFGPTVDGDFLT

SEQ ID NO: 9166 - protein, 21 aa, Artificial sequence
  synthetic peptide
PYGTPLSVNFGPTVDGDFLTD

SEQ ID NO: 9167 - protein, 21 aa, Artificial sequence
  synthetic peptide
YGTPLSVNFGPTVDGDFLTDM

SEQ ID NO: 9168 - protein, 21 aa, Artificial sequence
  synthetic peptide
GTPLSVNFGPTVDGDFLTDMP

SEQ ID NO: 9169 - protein, 21 aa, Artificial sequence
  synthetic peptide
TPLSVNFGPTVDGDFLTDMPD

SEQ ID NO: 9170 - protein, 21 aa, Artificial sequence
  synthetic peptide
PLSVNFGPTVDGDFLTDMPDI

SEQ ID NO: 9171 - protein, 21 aa, Artificial sequence
  synthetic peptide
LSVNFGPTVDGDFLTDMPDIL

SEQ ID NO: 9172 - protein, 21 aa, Artificial sequence
  synthetic peptide
SVNFGPTVDGDFLTDMPDILL

SEQ ID NO: 9173 - protein, 21 aa, Artificial sequence
  synthetic peptide
VNFGPTVDGDFLTDMPDILLE

SEQ ID NO: 9174 - protein, 21 aa, Artificial sequence
  synthetic peptide
NFGPTVDGDFLTDMPDILLEL

SEQ ID NO: 9175 - protein, 21 aa, Artificial sequence
  synthetic peptide
FGPTVDGDFLTDMPDILLELG

SEQ ID NO: 9176 - protein, 21 aa, Artificial sequence
  synthetic peptide
GPTVDGDFLTDMPDILLELGQ

SEQ ID NO: 9177 - protein, 21 aa, Artificial sequence
  synthetic peptide
PTVDGDFLTDMPDILLELGQF

SEQ ID NO: 9178 - protein, 21 aa, Artificial sequence
  synthetic peptide
TVDGDFLTDMPDILLELGQFK

SEQ ID NO: 9179 - protein, 21 aa, Artificial sequence
  synthetic peptide
VDGDFLTDMPDILLELGQFKK

SEQ ID NO: 9180 - protein, 21 aa, Artificial sequence
  synthetic peptide
DGDFLTDMPDILLELGQFKKT

SEQ ID NO: 9181 - protein, 21 aa, Artificial sequence
  synthetic peptide
GDFLTDMPDILLELGQFKKTQ

SEQ ID NO: 9182 - protein, 21 aa, Artificial sequence
  synthetic peptide
DFLTDMPDILLELGQFKKTQI

SEQ ID NO: 9183 - protein, 21 aa, Artificial sequence
  synthetic peptide
FLTDMPDILLELGQFKKTQIL

SEQ ID NO: 9184 - protein, 21 aa, Artificial sequence
  synthetic peptide
LTDMPDILLELGQFKKTQILV

SEQ ID NO: 9185 - protein, 21 aa, Artificial sequence
  synthetic peptide
TDMPDILLELGQFKKTQILVG

SEQ ID NO: 9186 - protein, 21 aa, Artificial sequence
  synthetic peptide
DMPDILLELGQFKKTQILVGV

SEQ ID NO: 9187 - protein, 21 aa, Artificial sequence
  synthetic peptide
MPDILLELGQFKKTQILVGVN

SEQ ID NO: 9188 - protein, 21 aa, Artificial sequence
  synthetic peptide
PDILLELGQFKKTQILVGVNK

SEQ ID NO: 9189 - protein, 21 aa, Artificial sequence
  synthetic peptide
DILLELGQFKKTQILVGVNKD

SEQ ID NO: 9190 - protein, 21 aa, Artificial sequence
  synthetic peptide
ILLELGQFKKTQILVGVNKDE

SEQ ID NO: 9191 - protein, 21 aa, Artificial sequence
  synthetic peptide
LLELGQFKKTQILVGVNKDEG

SEQ ID NO: 9192 - protein, 21 aa, Artificial sequence
  synthetic peptide
LELGQFKKTQILVGVNKDEGT

SEQ ID NO: 9193 - protein, 21 aa, Artificial sequence
  synthetic peptide
ELGQFKKTQILVGVNKDEGTA

SEQ ID NO: 9194 - protein, 21 aa, Artificial sequence
  synthetic peptide
LGQFKKTQILVGVNKDEGTAF

SEQ ID NO: 9195 - protein, 21 aa, Artificial sequence
  synthetic peptide
GQFKKTQILVGVNKDEGTAFL

SEQ ID NO: 9196 - protein, 21 aa, Artificial sequence
  synthetic peptide
QFKKTQILVGVNKDEGTAFLV

SEQ ID NO: 9197 - protein, 21 aa, Artificial sequence
  synthetic peptide
FKKTQILVGVNKDEGTAFLVY

SEQ ID NO: 9198 - protein, 21 aa, Artificial sequence
  synthetic peptide
KKTQILVGVNKDEGTAFLVYG

SEQ ID NO: 9199 - protein, 21 aa, Artificial sequence
  synthetic peptide
KTQILVGVNKDEGTAFLVYGA

SEQ ID NO: 9200 - protein, 21 aa, Artificial sequence
  synthetic peptide
TQILVGVNKDEGTAFLVYGAP

SEQ ID NO: 9201 - protein, 21 aa, Artificial sequence
  synthetic peptide
QILVGVNKDEGTAFLVYGAPG

SEQ ID NO: 9202 - protein, 21 aa, Artificial sequence
  synthetic peptide
ILVGVNKDEGTAFLVYGAPGF

SEQ ID NO: 9203 - protein, 21 aa, Artificial sequence
  synthetic peptide
LVGVNKDEGTAFLVYGAPGFS

SEQ ID NO: 9204 - protein, 21 aa, Artificial sequence
  synthetic peptide
VGVNKDEGTAFLVYGAPGFSK

SEQ ID NO: 9205 - protein, 21 aa, Artificial sequence
  synthetic peptide
GVNKDEGTAFLVYGAPGFSKD

SEQ ID NO: 9206 - protein, 21 aa, Artificial sequence
  synthetic peptide
VNKDEGTAFLVYGAPGFSKDN

SEQ ID NO: 9207 - protein, 21 aa, Artificial sequence
  synthetic peptide
NKDEGTAFLVYGAPGFSKDNN

SEQ ID NO: 9208 - protein, 21 aa, Artificial sequence
  synthetic peptide
KDEGTAFLVYGAPGFSKDNNS

SEQ ID NO: 9209 - protein, 21 aa, Artificial sequence
  synthetic peptide
DEGTAFLVYGAPGFSKDNNSI

SEQ ID NO: 9210 - protein, 21 aa, Artificial sequence
  synthetic peptide
EGTAFLVYGAPGFSKDNNSII

SEQ ID NO: 9211 - protein, 21 aa, Artificial sequence
  synthetic peptide
GTAFLVYGAPGFSKDNNSIIT

SEQ ID NO: 9212 - protein, 21 aa, Artificial sequence
  synthetic peptide
TAFLVYGAPGFSKDNNSIITR

SEQ ID NO: 9213 - protein, 21 aa, Artificial sequence
  synthetic peptide
AFLVYGAPGFSKDNNSIITRK

SEQ ID NO: 9214 - protein, 21 aa, Artificial sequence
  synthetic peptide
FLVYGAPGFSKDNNSIITRKE

SEQ ID NO: 9215 - protein, 21 aa, Artificial sequence
  synthetic peptide
LVYGAPGFSKDNNSIITRKEF

SEQ ID NO: 9216 - protein, 21 aa, Artificial sequence
  synthetic peptide
VYGAPGFSKDNNSIITRKEFQ

SEQ ID NO: 9217 - protein, 21 aa, Artificial sequence
  synthetic peptide
YGAPGFSKDNNSIITRKEFQE

SEQ ID NO: 9218 - protein, 21 aa, Artificial sequence
  synthetic peptide
GAPGFSKDNNSIITRKEFQEG

SEQ ID NO: 9219 - protein, 21 aa, Artificial sequence
  synthetic peptide
APGFSKDNNSIITRKEFQEGL

SEQ ID NO: 9220 - protein, 21 aa, Artificial sequence
  synthetic peptide
PGFSKDNNSIITRKEFQEGLK

SEQ ID NO: 9221 - protein, 21 aa, Artificial sequence
  synthetic peptide
GFSKDNNSIITRKEFQEGLKI

SEQ ID NO: 9222 - protein, 21 aa, Artificial sequence
  synthetic peptide
FSKDNNSIITRKEFQEGLKIF

SEQ ID NO: 9223 - protein, 21 aa, Artificial sequence
  synthetic peptide
SKDNNSIITRKEFQEGLKIFF

SEQ ID NO: 9224 - protein, 21 aa, Artificial sequence
  synthetic peptide
KDNNSIITRKEFQEGLKIFFP

SEQ ID NO: 9225 - protein, 21 aa, Artificial sequence
  synthetic peptide
DNNSIITRKEFQEGLKIFFPG

SEQ ID NO: 9226 - protein, 21 aa, Artificial sequence
  synthetic peptide
NNSIITRKEFQEGLKIFFPGV

SEQ ID NO: 9227 - protein, 21 aa, Artificial sequence
  synthetic peptide
NSIITRKEFQEGLKIFFPGVS

SEQ ID NO: 9228 - protein, 21 aa, Artificial sequence
  synthetic peptide
SIITRKEFQEGLKIFFPGVSE

SEQ ID NO: 9229 - protein, 21 aa, Artificial sequence
  synthetic peptide
IITRKEFQEGLKIFFPGVSEF

SEQ ID NO: 9230 - protein, 21 aa, Artificial sequence
  synthetic peptide
ITRKEFQEGLKIFFPGVSEFG

SEQ ID NO: 9231 - protein, 21 aa, Artificial sequence
  synthetic peptide
TRKEFQEGLKIFFPGVSEFGK

SEQ ID NO: 9232 - protein, 21 aa, Artificial sequence
  synthetic peptide
RKEFQEGLKIFFPGVSEFGKE

SEQ ID NO: 9233 - protein, 21 aa, Artificial sequence
  synthetic peptide
KEFQEGLKIFFPGVSEFGKES

SEQ ID NO: 9234 - protein, 21 aa, Artificial sequence
  synthetic peptide
EFQEGLKIFFPGVSEFGKESI

SEQ ID NO: 9235 - protein, 21 aa, Artificial sequence
  synthetic peptide
FQEGLKIFFPGVSEFGKESIL

SEQ ID NO: 9236 - protein, 21 aa, Artificial sequence
  synthetic peptide
QEGLKIFFPGVSEFGKESILF

SEQ ID NO: 9237 - protein, 21 aa, Artificial sequence
  synthetic peptide
EGLKIFFPGVSEFGKESILFH

SEQ ID NO: 9238 - protein, 21 aa, Artificial sequence
  synthetic peptide
GLKIFFPGVSEFGKESILFHY

SEQ ID NO: 9239 - protein, 21 aa, Artificial sequence
  synthetic peptide
LKIFFPGVSEFGKESILFHYT

SEQ ID NO: 9240 - protein, 21 aa, Artificial sequence
  synthetic peptide
KIFFPGVSEFGKESILFHYTD

SEQ ID NO: 9241 - protein, 21 aa, Artificial sequence
  synthetic peptide
IFFPGVSEFGKESILFHYTDW

SEQ ID NO: 9242 - protein, 21 aa, Artificial sequence
  synthetic peptide
FFPGVSEFGKESILFHYTDWV

SEQ ID NO: 9243 - protein, 21 aa, Artificial sequence
  synthetic peptide
FPGVSEFGKESILFHYTDWVD

SEQ ID NO: 9244 - protein, 21 aa, Artificial sequence
  synthetic peptide
PGVSEFGKESILFHYTDWVDD

SEQ ID NO: 9245 - protein, 21 aa, Artificial sequence
  synthetic peptide
GVSEFGKESILFHYTDWVDDQ

SEQ ID NO: 9246 - protein, 21 aa, Artificial sequence
  synthetic peptide
VSEFGKESILFHYTDWVDDQR

SEQ ID NO: 9247 - protein, 21 aa, Artificial sequence
  synthetic peptide
SEFGKESILFHYTDWVDDQRP

SEQ ID NO: 9248 - protein, 21 aa, Artificial sequence
  synthetic peptide
EFGKESILFHYTDWVDDQRPE

SEQ ID NO: 9249 - protein, 21 aa, Artificial sequence
  synthetic peptide
FGKESILFHYTDWVDDQRPEN

SEQ ID NO: 9250 - protein, 21 aa, Artificial sequence
  synthetic peptide
GKESILFHYTDWVDDQRPENY

SEQ ID NO: 9251 - protein, 21 aa, Artificial sequence
  synthetic peptide
KESILFHYTDWVDDQRPENYR

SEQ ID NO: 9252 - protein, 21 aa, Artificial sequence
  synthetic peptide
ESILFHYTDWVDDQRPENYRE

SEQ ID NO: 9253 - protein, 21 aa, Artificial sequence
  synthetic peptide
SILFHYTDWVDDQRPENYREA

SEQ ID NO: 9254 - protein, 21 aa, Artificial sequence
  synthetic peptide
ILFHYTDWVDDQRPENYREAL

SEQ ID NO: 9255 - protein, 21 aa, Artificial sequence
  synthetic peptide
LFHYTDWVDDQRPENYREALG

SEQ ID NO: 9256 - protein, 21 aa, Artificial sequence
  synthetic peptide
FHYTDWVDDQRPENYREALGD

SEQ ID NO: 9257 - protein, 21 aa, Artificial sequence
  synthetic peptide
HYTDWVDDQRPENYREALGDV

SEQ ID NO: 9258 - protein, 21 aa, Artificial sequence
  synthetic peptide
YTDWVDDQRPENYREALGDVV

SEQ ID NO: 9259 - protein, 21 aa, Artificial sequence
  synthetic peptide
TDWVDDQRPENYREALGDVVG

SEQ ID NO: 9260 - protein, 21 aa, Artificial sequence
  synthetic peptide
DWVDDQRPENYREALGDVVGD

SEQ ID NO: 9261 - protein, 21 aa, Artificial sequence
  synthetic peptide
WVDDQRPENYREALGDVVGDY

SEQ ID NO: 9262 - protein, 21 aa, Artificial sequence
  synthetic peptide
VDDQRPENYREALGDVVGDYN

SEQ ID NO: 9263 - protein, 21 aa, Artificial sequence
  synthetic peptide
DDQRPENYREALGDVVGDYNF

SEQ ID NO: 9264 - protein, 21 aa, Artificial sequence
  synthetic peptide
DQRPENYREALGDVVGDYNFI

SEQ ID NO: 9265 - protein, 21 aa, Artificial sequence
  synthetic peptide
QRPENYREALGDVVGDYNFIC

SEQ ID NO: 9266 - protein, 21 aa, Artificial sequence
  synthetic peptide
RPENYREALGDVVGDYNFICP

SEQ ID NO: 9267 - protein, 21 aa, Artificial sequence
  synthetic peptide
PENYREALGDVVGDYNFICPA

SEQ ID NO: 9268 - protein, 21 aa, Artificial sequence
  synthetic peptide
ENYREALGDVVGDYNFICPAL

SEQ ID NO: 9269 - protein, 21 aa, Artificial sequence
  synthetic peptide
NYREALGDVVGDYNFICPALE

SEQ ID NO: 9270 - protein, 21 aa, Artificial sequence
  synthetic peptide
YREALGDVVGDYNFICPALEF

SEQ ID NO: 9271 - protein, 21 aa, Artificial sequence
  synthetic peptide
REALGDVVGDYNFICPALEFT

SEQ ID NO: 9272 - protein, 21 aa, Artificial sequence
  synthetic peptide
EALGDVVGDYNFICPALEFTK

SEQ ID NO: 9273 - protein, 21 aa, Artificial sequence
  synthetic peptide
ALGDVVGDYNFICPALEFTKK

SEQ ID NO: 9274 - protein, 21 aa, Artificial sequence
  synthetic peptide
LGDVVGDYNFICPALEFTKKF

SEQ ID NO: 9275 - protein, 21 aa, Artificial sequence
  synthetic peptide
GDVVGDYNFICPALEFTKKFS

SEQ ID NO: 9276 - protein, 21 aa, Artificial sequence
  synthetic peptide
DVVGDYNFICPALEFTKKFSE

SEQ ID NO: 9277 - protein, 21 aa, Artificial sequence
  synthetic peptide
VVGDYNFICPALEFTKKFSEW

SEQ ID NO: 9278 - protein, 21 aa, Artificial sequence
  synthetic peptide
VGDYNFICPALEFTKKFSEWG

SEQ ID NO: 9279 - protein, 21 aa, Artificial sequence
  synthetic peptide
GDYNFICPALEFTKKFSEWGN

SEQ ID NO: 9280 - protein, 21 aa, Artificial sequence
  synthetic peptide
DYNFICPALEFTKKFSEWGNN

SEQ ID NO: 9281 - protein, 21 aa, Artificial sequence
  synthetic peptide
YNFICPALEFTKKFSEWGNNA

SEQ ID NO: 9282 - protein, 21 aa, Artificial sequence
  synthetic peptide
NFICPALEFTKKFSEWGNNAF

SEQ ID NO: 9283 - protein, 21 aa, Artificial sequence
  synthetic peptide
FICPALEFTKKFSEWGNNAFF

SEQ ID NO: 9284 - protein, 21 aa, Artificial sequence
  synthetic peptide
ICPALEFTKKFSEWGNNAFFY

SEQ ID NO: 9285 - protein, 21 aa, Artificial sequence
  synthetic peptide
CPALEFTKKFSEWGNNAFFYY

SEQ ID NO: 9286 - protein, 21 aa, Artificial sequence
  synthetic peptide
PALEFTKKFSEWGNNAFFYYF

SEQ ID NO: 9287 - protein, 21 aa, Artificial sequence
  synthetic peptide
ALEFTKKFSEWGNNAFFYYFE

SEQ ID NO: 9288 - protein, 21 aa, Artificial sequence
  synthetic peptide
LEFTKKFSEWGNNAFFYYFEH

SEQ ID NO: 9289 - protein, 21 aa, Artificial sequence
  synthetic peptide
EFTKKFSEWGNNAFFYYFEHR

SEQ ID NO: 9290 - protein, 21 aa, Artificial sequence
  synthetic peptide
FTKKFSEWGNNAFFYYFEHRS

SEQ ID NO: 9291 - protein, 21 aa, Artificial sequence
  synthetic peptide
TKKFSEWGNNAFFYYFEHRSS

SEQ ID NO: 9292 - protein, 21 aa, Artificial sequence
  synthetic peptide
KKFSEWGNNAFFYYFEHRSSK

SEQ ID NO: 9293 - protein, 21 aa, Artificial sequence
  synthetic peptide
KFSEWGNNAFFYYFEHRSSKL

SEQ ID NO: 9294 - protein, 21 aa, Artificial sequence
  synthetic peptide
FSEWGNNAFFYYFEHRSSKLP

SEQ ID NO: 9295 - protein, 21 aa, Artificial sequence
  synthetic peptide
SEWGNNAFFYYFEHRSSKLPW

SEQ ID NO: 9296 - protein, 21 aa, Artificial sequence
  synthetic peptide
EWGNNAFFYYFEHRSSKLPWP

SEQ ID NO: 9297 - protein, 21 aa, Artificial sequence
  synthetic peptide
WGNNAFFYYFEHRSSKLPWPE

SEQ ID NO: 9298 - protein, 21 aa, Artificial sequence
  synthetic peptide
GNNAFFYYFEHRSSKLPWPEW

SEQ ID NO: 9299 - protein, 21 aa, Artificial sequence
  synthetic peptide
NNAFFYYFEHRSSKLPWPEWM

SEQ ID NO: 9300 - protein, 21 aa, Artificial sequence
  synthetic peptide
NAFFYYFEHRSSKLPWPEWMG

SEQ ID NO: 9301 - protein, 21 aa, Artificial sequence
  synthetic peptide
AFFYYFEHRSSKLPWPEWMGV

SEQ ID NO: 9302 - protein, 21 aa, Artificial sequence
  synthetic peptide
FFYYFEHRSSKLPWPEWMGVM

SEQ ID NO: 9303 - protein, 21 aa, Artificial sequence
  synthetic peptide
FYYFEHRSSKLPWPEWMGVMH

SEQ ID NO: 9304 - protein, 21 aa, Artificial sequence
  synthetic peptide
YYFEHRSSKLPWPEWMGVMHG

SEQ ID NO: 9305 - protein, 21 aa, Artificial sequence
  synthetic peptide
YFEHRSSKLPWPEWMGVMHGY

SEQ ID NO: 9306 - protein, 21 aa, Artificial sequence
  synthetic peptide
FEHRSSKLPWPEWMGVMHGYE

SEQ ID NO: 9307 - protein, 21 aa, Artificial sequence
  synthetic peptide
EHRSSKLPWPEWMGVMHGYEI

SEQ ID NO: 9308 - protein, 21 aa, Artificial sequence
  synthetic peptide
HRSSKLPWPEWMGVMHGYEIE

SEQ ID NO: 9309 - protein, 21 aa, Artificial sequence
  synthetic peptide
RSSKLPWPEWMGVMHGYEIEF

SEQ ID NO: 9310 - protein, 21 aa, Artificial sequence
  synthetic peptide
SSKLPWPEWMGVMHGYEIEFV

SEQ ID NO: 9311 - protein, 21 aa, Artificial sequence
  synthetic peptide
SKLPWPEWMGVMHGYEIEFVF

SEQ ID NO: 9312 - protein, 21 aa, Artificial sequence
  synthetic peptide
KLPWPEWMGVMHGYEIEFVFG

SEQ ID NO: 9313 - protein, 21 aa, Artificial sequence
  synthetic peptide
LPWPEWMGVMHGYEIEFVFGL

SEQ ID NO: 9314 - protein, 21 aa, Artificial sequence
  synthetic peptide
PWPEWMGVMHGYEIEFVFGLP

SEQ ID NO: 9315 - protein, 21 aa, Artificial sequence
  synthetic peptide
WPEWMGVMHGYEIEFVFGLPL

SEQ ID NO: 9316 - protein, 21 aa, Artificial sequence
  synthetic peptide
PEWMGVMHGYEIEFVFGLPLE

SEQ ID NO: 9317 - protein, 21 aa, Artificial sequence
  synthetic peptide
EWMGVMHGYEIEFVFGLPLER

SEQ ID NO: 9318 - protein, 21 aa, Artificial sequence
  synthetic peptide
WMGVMHGYEIEFVFGLPLERR

SEQ ID NO: 9319 - protein, 21 aa, Artificial sequence
  synthetic peptide
MGVMHGYEIEFVFGLPLERRD

SEQ ID NO: 9320 - protein, 21 aa, Artificial sequence
  synthetic peptide
GVMHGYEIEFVFGLPLERRDN

SEQ ID NO: 9321 - protein, 21 aa, Artificial sequence
  synthetic peptide
VMHGYEIEFVFGLPLERRDNY

SEQ ID NO: 9322 - protein, 21 aa, Artificial sequence
  synthetic peptide
MHGYEIEFVFGLPLERRDNYT

SEQ ID NO: 9323 - protein, 21 aa, Artificial sequence
  synthetic peptide
HGYEIEFVFGLPLERRDNYTK

SEQ ID NO: 9324 - protein, 21 aa, Artificial sequence
  synthetic peptide
GYEIEFVFGLPLERRDNYTKA

SEQ ID NO: 9325 - protein, 21 aa, Artificial sequence
  synthetic peptide
YEIEFVFGLPLERRDNYTKAE

SEQ ID NO: 9326 - protein, 21 aa, Artificial sequence
  synthetic peptide
EIEFVFGLPLERRDNYTKAEE

SEQ ID NO: 9327 - protein, 21 aa, Artificial sequence
  synthetic peptide
IEFVFGLPLERRDNYTKAEEI

SEQ ID NO: 9328 - protein, 21 aa, Artificial sequence
  synthetic peptide
EFVFGLPLERRDNYTKAEEIL

SEQ ID NO: 9329 - protein, 21 aa, Artificial sequence
  synthetic peptide
FVFGLPLERRDNYTKAEEILS

SEQ ID NO: 9330 - protein, 21 aa, Artificial sequence
  synthetic peptide
VFGLPLERRDNYTKAEEILSR

SEQ ID NO: 9331 - protein, 21 aa, Artificial sequence
  synthetic peptide
FGLPLERRDNYTKAEEILSRS

SEQ ID NO: 9332 - protein, 21 aa, Artificial sequence
  synthetic peptide
GLPLERRDNYTKAEEILSRSI

SEQ ID NO: 9333 - protein, 21 aa, Artificial sequence
  synthetic peptide
LPLERRDNYTKAEEILSRSIV

SEQ ID NO: 9334 - protein, 21 aa, Artificial sequence
  synthetic peptide
PLERRDNYTKAEEILSRSIVK

SEQ ID NO: 9335 - protein, 21 aa, Artificial sequence
  synthetic peptide
LERRDNYTKAEEILSRSIVKR

SEQ ID NO: 9336 - protein, 21 aa, Artificial sequence
  synthetic peptide
ERRDNYTKAEEILSRSIVKRW

SEQ ID NO: 9337 - protein, 21 aa, Artificial sequence
  synthetic peptide
RRDNYTKAEEILSRSIVKRWA

SEQ ID NO: 9338 - protein, 21 aa, Artificial sequence
  synthetic peptide
RDNYTKAEEILSRSIVKRWAN

SEQ ID NO: 9339 - protein, 21 aa, Artificial sequence
  synthetic peptide
DNYTKAEEILSRSIVKRWANF

SEQ ID NO: 9340 - protein, 21 aa, Artificial sequence
  synthetic peptide
NYTKAEEILSRSIVKRWANFA

SEQ ID NO: 9341 - protein, 21 aa, Artificial sequence
  synthetic peptide
YTKAEEILSRSIVKRWANFAK

SEQ ID NO: 9342 - protein, 21 aa, Artificial sequence
  synthetic peptide
TKAEEILSRSIVKRWANFAKY

SEQ ID NO: 9343 - protein, 21 aa, Artificial sequence
  synthetic peptide
KAEEILSRSIVKRWANFAKYG

SEQ ID NO: 9344 - protein, 21 aa, Artificial sequence
  synthetic peptide
AEEILSRSIVKRWANFAKYGN

SEQ ID NO: 9345 - protein, 21 aa, Artificial sequence
  synthetic peptide
EEILSRSIVKRWANFAKYGNP

SEQ ID NO: 9346 - protein, 21 aa, Artificial sequence
  synthetic peptide
EILSRSIVKRWANFAKYGNPN

SEQ ID NO: 9347 - protein, 21 aa, Artificial sequence
  synthetic peptide
ILSRSIVKRWANFAKYGNPNE

SEQ ID NO: 9348 - protein, 21 aa, Artificial sequence
  synthetic peptide
LSRSIVKRWANFAKYGNPNET

SEQ ID NO: 9349 - protein, 21 aa, Artificial sequence
  synthetic peptide
SRSIVKRWANFAKYGNPNETQ

SEQ ID NO: 9350 - protein, 21 aa, Artificial sequence
  synthetic peptide
RSIVKRWANFAKYGNPNETQN

SEQ ID NO: 9351 - protein, 21 aa, Artificial sequence
  synthetic peptide
SIVKRWANFAKYGNPNETQNN

SEQ ID NO: 9352 - protein, 21 aa, Artificial sequence
  synthetic peptide
IVKRWANFAKYGNPNETQNNS

SEQ ID NO: 9353 - protein, 21 aa, Artificial sequence
  synthetic peptide
VKRWANFAKYGNPNETQNNST

SEQ ID NO: 9354 - protein, 21 aa, Artificial sequence
  synthetic peptide
KRWANFAKYGNPNETQNNSTS

SEQ ID NO: 9355 - protein, 21 aa, Artificial sequence
  synthetic peptide
RWANFAKYGNPNETQNNSTSW

SEQ ID NO: 9356 - protein, 21 aa, Artificial sequence
  synthetic peptide
WANFAKYGNPNETQNNSTSWP

SEQ ID NO: 9357 - protein, 21 aa, Artificial sequence
  synthetic peptide
ANFAKYGNPNETQNNSTSWPV

SEQ ID NO: 9358 - protein, 21 aa, Artificial sequence
  synthetic peptide
NFAKYGNPNETQNNSTSWPVF

SEQ ID NO: 9359 - protein, 21 aa, Artificial sequence
  synthetic peptide
FAKYGNPNETQNNSTSWPVFK

SEQ ID NO: 9360 - protein, 21 aa, Artificial sequence
  synthetic peptide
AKYGNPNETQNNSTSWPVFKS

SEQ ID NO: 9361 - protein, 21 aa, Artificial sequence
  synthetic peptide
KYGNPNETQNNSTSWPVFKST

SEQ ID NO: 9362 - protein, 21 aa, Artificial sequence
  synthetic peptide
YGNPNETQNNSTSWPVFKSTE

SEQ ID NO: 9363 - protein, 21 aa, Artificial sequence
  synthetic peptide
GNPNETQNNSTSWPVFKSTEQ

SEQ ID NO: 9364 - protein, 21 aa, Artificial sequence
  synthetic peptide
NPNETQNNSTSWPVFKSTEQK

SEQ ID NO: 9365 - protein, 21 aa, Artificial sequence
  synthetic peptide
PNETQNNSTSWPVFKSTEQKY

SEQ ID NO: 9366 - protein, 21 aa, Artificial sequence
  synthetic peptide
NETQNNSTSWPVFKSTEQKYL

SEQ ID NO: 9367 - protein, 21 aa, Artificial sequence
  synthetic peptide
ETQNNSTSWPVFKSTEQKYLT

SEQ ID NO: 9368 - protein, 21 aa, Artificial sequence
  synthetic peptide
TQNNSTSWPVFKSTEQKYLTL

SEQ ID NO: 9369 - protein, 21 aa, Artificial sequence
  synthetic peptide
QNNSTSWPVFKSTEQKYLTLN

SEQ ID NO: 9370 - protein, 21 aa, Artificial sequence
  synthetic peptide
NNSTSWPVFKSTEQKYLTLNT

SEQ ID NO: 9371 - protein, 21 aa, Artificial sequence
  synthetic peptide
NSTSWPVFKSTEQKYLTLNTE

SEQ ID NO: 9372 - protein, 21 aa, Artificial sequence
  synthetic peptide
STSWPVFKSTEQKYLTLNTES

SEQ ID NO: 9373 - protein, 21 aa, Artificial sequence
  synthetic peptide
TSWPVFKSTEQKYLTLNTEST

SEQ ID NO: 9374 - protein, 21 aa, Artificial sequence
  synthetic peptide
SWPVFKSTEQKYLTLNTESTR

SEQ ID NO: 9375 - protein, 21 aa, Artificial sequence
  synthetic peptide
WPVFKSTEQKYLTLNTESTRI

SEQ ID NO: 9376 - protein, 21 aa, Artificial sequence
  synthetic peptide
PVFKSTEQKYLTLNTESTRIM

SEQ ID NO: 9377 - protein, 21 aa, Artificial sequence
  synthetic peptide
VFKSTEQKYLTLNTESTRIMT

SEQ ID NO: 9378 - protein, 21 aa, Artificial sequence
  synthetic peptide
FKSTEQKYLTLNTESTRIMTK

SEQ ID NO: 9379 - protein, 21 aa, Artificial sequence
  synthetic peptide
KSTEQKYLTLNTESTRIMTKL

SEQ ID NO: 9380 - protein, 21 aa, Artificial sequence
  synthetic peptide
STEQKYLTLNTESTRIMTKLR

SEQ ID NO: 9381 - protein, 21 aa, Artificial sequence
  synthetic peptide
TEQKYLTLNTESTRIMTKLRA

SEQ ID NO: 9382 - protein, 21 aa, Artificial sequence
  synthetic peptide
EQKYLTLNTESTRIMTKLRAQ

SEQ ID NO: 9383 - protein, 21 aa, Artificial sequence
  synthetic peptide
QKYLTLNTESTRIMTKLRAQQ

SEQ ID NO: 9384 - protein, 21 aa, Artificial sequence
  synthetic peptide
KYLTLNTESTRIMTKLRAQQC

SEQ ID NO: 9385 - protein, 21 aa, Artificial sequence
  synthetic peptide
YLTLNTESTRIMTKLRAQQCR

SEQ ID NO: 9386 - protein, 21 aa, Artificial sequence
  synthetic peptide
LTLNTESTRIMTKLRAQQCRF

SEQ ID NO: 9387 - protein, 21 aa, Artificial sequence
  synthetic peptide
TLNTESTRIMTKLRAQQCRFW

SEQ ID NO: 9388 - protein, 21 aa, Artificial sequence
  synthetic peptide
LNTESTRIMTKLRAQQCRFWT

SEQ ID NO: 9389 - protein, 21 aa, Artificial sequence
  synthetic peptide
NTESTRIMTKLRAQQCRFWTS

SEQ ID NO: 9390 - protein, 21 aa, Artificial sequence
  synthetic peptide
TESTRIMTKLRAQQCRFWTSF

SEQ ID NO: 9391 - protein, 21 aa, Artificial sequence
  synthetic peptide
ESTRIMTKLRAQQCRFWTSFF

SEQ ID NO: 9392 - protein, 21 aa, Artificial sequence
  synthetic peptide
STRIMTKLRAQQCRFWTSFFP

SEQ ID NO: 9393 - protein, 21 aa, Artificial sequence
  synthetic peptide
TRIMTKLRAQQCRFWTSFFPK

SEQ ID NO: 9394 - protein, 21 aa, Artificial sequence
  synthetic peptide
RIMTKLRAQQCRFWTSFFPKV

SEQ ID NO: 9395 - protein, 21 aa, Artificial sequence
  synthetic peptide
IMTKLRAQQCRFWTSFFPKVL

SEQ ID NO: 9396 - protein, 21 aa, Artificial sequence
  synthetic peptide
MTKLRAQQCRFWTSFFPKVLE

SEQ ID NO: 9397 - protein, 21 aa, Artificial sequence
  synthetic peptide
TKLRAQQCRFWTSFFPKVLEM

SEQ ID NO: 9398 - protein, 21 aa, Artificial sequence
  synthetic peptide
KLRAQQCRFWTSFFPKVLEMT

SEQ ID NO: 9399 - protein, 21 aa, Artificial sequence
  synthetic peptide
LRAQQCRFWTSFFPKVLEMTG

SEQ ID NO: 9400 - protein, 21 aa, Artificial sequence
  synthetic peptide
RAQQCRFWTSFFPKVLEMTGN

SEQ ID NO: 9401 - protein, 21 aa, Artificial sequence
  synthetic peptide
AQQCRFWTSFFPKVLEMTGNI

SEQ ID NO: 9402 - protein, 21 aa, Artificial sequence
  synthetic peptide
QQCRFWTSFFPKVLEMTGNID

SEQ ID NO: 9403 - protein, 21 aa, Artificial sequence
  synthetic peptide
QCRFWTSFFPKVLEMTGNIDE

SEQ ID NO: 9404 - protein, 21 aa, Artificial sequence
  synthetic peptide
CRFWTSFFPKVLEMTGNIDEA

SEQ ID NO: 9405 - protein, 21 aa, Artificial sequence
  synthetic peptide
RFWTSFFPKVLEMTGNIDEAE

SEQ ID NO: 9406 - protein, 21 aa, Artificial sequence
  synthetic peptide
FWTSFFPKVLEMTGNIDEAEW

SEQ ID NO: 9407 - protein, 21 aa, Artificial sequence
  synthetic peptide
WTSFFPKVLEMTGNIDEAEWE

SEQ ID NO: 9408 - protein, 21 aa, Artificial sequence
  synthetic peptide
TSFFPKVLEMTGNIDEAEWEW

SEQ ID NO: 9409 - protein, 21 aa, Artificial sequence
  synthetic peptide
SFFPKVLEMTGNIDEAEWEWK

SEQ ID NO: 9410 - protein, 21 aa, Artificial sequence
  synthetic peptide
FFPKVLEMTGNIDEAEWEWKA

SEQ ID NO: 9411 - protein, 21 aa, Artificial sequence
  synthetic peptide
FPKVLEMTGNIDEAEWEWKAG

SEQ ID NO: 9412 - protein, 21 aa, Artificial sequence
  synthetic peptide
PKVLEMTGNIDEAEWEWKAGF

SEQ ID NO: 9413 - protein, 21 aa, Artificial sequence
  synthetic peptide
KVLEMTGNIDEAEWEWKAGFH

SEQ ID NO: 9414 - protein, 21 aa, Artificial sequence
  synthetic peptide
VLEMTGNIDEAEWEWKAGFHR

SEQ ID NO: 9415 - protein, 21 aa, Artificial sequence
  synthetic peptide
LEMTGNIDEAEWEWKAGFHRW

SEQ ID NO: 9416 - protein, 21 aa, Artificial sequence
  synthetic peptide
EMTGNIDEAEWEWKAGFHRWN

SEQ ID NO: 9417 - protein, 21 aa, Artificial sequence
  synthetic peptide
MTGNIDEAEWEWKAGFHRWNN

SEQ ID NO: 9418 - protein, 21 aa, Artificial sequence
  synthetic peptide
TGNIDEAEWEWKAGFHRWNNY

SEQ ID NO: 9419 - protein, 21 aa, Artificial sequence
  synthetic peptide
GNIDEAEWEWKAGFHRWNNYM

SEQ ID NO: 9420 - protein, 21 aa, Artificial sequence
  synthetic peptide
NIDEAEWEWKAGFHRWNNYMM

SEQ ID NO: 9421 - protein, 21 aa, Artificial sequence
  synthetic peptide
IDEAEWEWKAGFHRWNNYMMD

SEQ ID NO: 9422 - protein, 21 aa, Artificial sequence
  synthetic peptide
DEAEWEWKAGFHRWNNYMMDW

SEQ ID NO: 9423 - protein, 21 aa, Artificial sequence
  synthetic peptide
EAEWEWKAGFHRWNNYMMDWK

SEQ ID NO: 9424 - protein, 21 aa, Artificial sequence
  synthetic peptide
AEWEWKAGFHRWNNYMMDWKN

SEQ ID NO: 9425 - protein, 21 aa, Artificial sequence
  synthetic peptide
EWEWKAGFHRWNNYMMDWKNQ

SEQ ID NO: 9426 - protein, 21 aa, Artificial sequence
  synthetic peptide
WEWKAGFHRWNNYMMDWKNQF

SEQ ID NO: 9427 - protein, 21 aa, Artificial sequence
  synthetic peptide
EWKAGFHRWNNYMMDWKNQFN

SEQ ID NO: 9428 - protein, 21 aa, Artificial sequence
  synthetic peptide
WKAGFHRWNNYMMDWKNQFND

SEQ ID NO: 9429 - protein, 21 aa, Artificial sequence
  synthetic peptide
KAGFHRWNNYMMDWKNQFNDY

SEQ ID NO: 9430 - protein, 21 aa, Artificial sequence
  synthetic peptide
AGFHRWNNYMMDWKNQFNDYT

SEQ ID NO: 9431 - protein, 21 aa, Artificial sequence
  synthetic peptide
GFHRWNNYMMDWKNQFNDYTS

SEQ ID NO: 9432 - protein, 21 aa, Artificial sequence
  synthetic peptide
FHRWNNYMMDWKNQFNDYTSK

SEQ ID NO: 9433 - protein, 21 aa, Artificial sequence
  synthetic peptide
HRWNNYMMDWKNQFNDYTSKK

SEQ ID NO: 9434 - protein, 21 aa, Artificial sequence
  synthetic peptide
RWNNYMMDWKNQFNDYTSKKE

SEQ ID NO: 9435 - protein, 21 aa, Artificial sequence
  synthetic peptide
WNNYMMDWKNQFNDYTSKKES

SEQ ID NO: 9436 - protein, 21 aa, Artificial sequence
  synthetic peptide
NNYMMDWKNQFNDYTSKKESC

SEQ ID NO: 9437 - protein, 21 aa, Artificial sequence
  synthetic peptide
NYMMDWKNQFNDYTSKKESCV

SEQ ID NO: 9438 - protein, 21 aa, Artificial sequence
  synthetic peptide
YMMDWKNQFNDYTSKKESCVG

SEQ ID NO: 9439 - protein, 21 aa, Artificial sequence
  synthetic peptide
MMDWKNQFNDYTSKKESCVGL

SEQ ID NO: 9440 - protein, 22 aa, Artificial sequence
  synthetic peptide
MHSKVTIICIRFLFWFLLLCML

SEQ ID NO: 9441 - protein, 22 aa, Artificial sequence
  synthetic peptide
HSKVTIICIRFLFWFLLLCMLI

SEQ ID NO: 9442 - protein, 22 aa, Artificial sequence
  synthetic peptide
SKVTIICIRFLFWFLLLCMLIG

SEQ ID NO: 9443 - protein, 22 aa, Artificial sequence
  synthetic peptide
KVTIICIRFLFWFLLLCMLIGK

SEQ ID NO: 9444 - protein, 22 aa, Artificial sequence
  synthetic peptide
VTIICIRFLFWFLLLCMLIGKS

SEQ ID NO: 9445 - protein, 22 aa, Artificial sequence
  synthetic peptide
TIICIRFLFWFLLLCMLIGKSH

SEQ ID NO: 9446 - protein, 22 aa, Artificial sequence
  synthetic peptide
IICIRFLFWFLLLCMLIGKSHT

SEQ ID NO: 9447 - protein, 22 aa, Artificial sequence
  synthetic peptide
ICIRFLFWFLLLCMLIGKSHTE

SEQ ID NO: 9448 - protein, 22 aa, Artificial sequence
  synthetic peptide
CIRFLFWFLLLCMLIGKSHTED

SEQ ID NO: 9449 - protein, 22 aa, Artificial sequence
  synthetic peptide
IRFLFWFLLLCMLIGKSHTEDD

SEQ ID NO: 9450 - protein, 22 aa, Artificial sequence
  synthetic peptide
RFLFWFLLLCMLIGKSHTEDDI

SEQ ID NO: 9451 - protein, 22 aa, Artificial sequence
  synthetic peptide
FLFWFLLLCMLIGKSHTEDDII

SEQ ID NO: 9452 - protein, 22 aa, Artificial sequence
  synthetic peptide
LFWFLLLCMLIGKSHTEDDIII

SEQ ID NO: 9453 - protein, 22 aa, Artificial sequence
  synthetic peptide
FWFLLLCMLIGKSHTEDDIIIA

SEQ ID NO: 9454 - protein, 22 aa, Artificial sequence
  synthetic peptide
WFLLLCMLIGKSHTEDDIIIAT

SEQ ID NO: 9455 - protein, 22 aa, Artificial sequence
  synthetic peptide
FLLLCMLIGKSHTEDDIIIATK

SEQ ID NO: 9456 - protein, 22 aa, Artificial sequence
  synthetic peptide
LLLCMLIGKSHTEDDIIIATKN

SEQ ID NO: 9457 - protein, 22 aa, Artificial sequence
  synthetic peptide
LLCMLIGKSHTEDDIIIATKNG

SEQ ID NO: 9458 - protein, 22 aa, Artificial sequence
  synthetic peptide
LCMLIGKSHTEDDIIIATKNGK

SEQ ID NO: 9459 - protein, 22 aa, Artificial sequence
  synthetic peptide
CMLIGKSHTEDDIIIATKNGKV

SEQ ID NO: 9460 - protein, 22 aa, Artificial sequence
  synthetic peptide
MLIGKSHTEDDIIIATKNGKVR

SEQ ID NO: 9461 - protein, 22 aa, Artificial sequence
  synthetic peptide
LIGKSHTEDDIIIATKNGKVRG

SEQ ID NO: 9462 - protein, 22 aa, Artificial sequence
  synthetic peptide
IGKSHTEDDIIIATKNGKVRGM

SEQ ID NO: 9463 - protein, 22 aa, Artificial sequence
  synthetic peptide
GKSHTEDDIIIATKNGKVRGMN

SEQ ID NO: 9464 - protein, 22 aa, Artificial sequence
  synthetic peptide
KSHTEDDIIIATKNGKVRGMNL

SEQ ID NO: 9465 - protein, 22 aa, Artificial sequence
  synthetic peptide
SHTEDDIIIATKNGKVRGMNLT

SEQ ID NO: 9466 - protein, 22 aa, Artificial sequence
  synthetic peptide
HTEDDIIIATKNGKVRGMNLTV

SEQ ID NO: 9467 - protein, 22 aa, Artificial sequence
  synthetic peptide
TEDDIIIATKNGKVRGMNLTVF

SEQ ID NO: 9468 - protein, 22 aa, Artificial sequence
  synthetic peptide
EDDIIIATKNGKVRGMNLTVFG

SEQ ID NO: 9469 - protein, 22 aa, Artificial sequence
  synthetic peptide
DDIIIATKNGKVRGMNLTVFGG

SEQ ID NO: 9470 - protein, 22 aa, Artificial sequence
  synthetic peptide
DIIIATKNGKVRGMNLTVFGGT

SEQ ID NO: 9471 - protein, 22 aa, Artificial sequence
  synthetic peptide
IIIATKNGKVRGMNLTVFGGTV

SEQ ID NO: 9472 - protein, 22 aa, Artificial sequence
  synthetic peptide
IIATKNGKVRGMNLTVFGGTVT

SEQ ID NO: 9473 - protein, 22 aa, Artificial sequence
  synthetic peptide
IATKNGKVRGMNLTVFGGTVTA

SEQ ID NO: 9474 - protein, 22 aa, Artificial sequence
  synthetic peptide
ATKNGKVRGMNLTVFGGTVTAF

SEQ ID NO: 9475 - protein, 22 aa, Artificial sequence
  synthetic peptide
TKNGKVRGMNLTVFGGTVTAFL

SEQ ID NO: 9476 - protein, 22 aa, Artificial sequence
  synthetic peptide
KNGKVRGMNLTVFGGTVTAFLG

SEQ ID NO: 9477 - protein, 22 aa, Artificial sequence
  synthetic peptide
NGKVRGMNLTVFGGTVTAFLGI

SEQ ID NO: 9478 - protein, 22 aa, Artificial sequence
  synthetic peptide
GKVRGMNLTVFGGTVTAFLGIP

SEQ ID NO: 9479 - protein, 22 aa, Artificial sequence
  synthetic peptide
KVRGMNLTVFGGTVTAFLGIPY

SEQ ID NO: 9480 - protein, 22 aa, Artificial sequence
  synthetic peptide
VRGMNLTVFGGTVTAFLGIPYA

SEQ ID NO: 9481 - protein, 22 aa, Artificial sequence
  synthetic peptide
RGMNLTVFGGTVTAFLGIPYAQ

SEQ ID NO: 9482 - protein, 22 aa, Artificial sequence
  synthetic peptide
GMNLTVFGGTVTAFLGIPYAQP

SEQ ID NO: 9483 - protein, 22 aa, Artificial sequence
  synthetic peptide
MNLTVFGGTVTAFLGIPYAQPP

SEQ ID NO: 9484 - protein, 22 aa, Artificial sequence
  synthetic peptide
NLTVFGGTVTAFLGIPYAQPPL

SEQ ID NO: 9485 - protein, 22 aa, Artificial sequence
  synthetic peptide
LTVFGGTVTAFLGIPYAQPPLG

SEQ ID NO: 9486 - protein, 22 aa, Artificial sequence
  synthetic peptide
TVFGGTVTAFLGIPYAQPPLGR

SEQ ID NO: 9487 - protein, 22 aa, Artificial sequence
  synthetic peptide
VFGGTVTAFLGIPYAQPPLGRL

SEQ ID NO: 9488 - protein, 22 aa, Artificial sequence
  synthetic peptide
FGGTVTAFLGIPYAQPPLGRLR

SEQ ID NO: 9489 - protein, 22 aa, Artificial sequence
  synthetic peptide
GGTVTAFLGIPYAQPPLGRLRF

SEQ ID NO: 9490 - protein, 22 aa, Artificial sequence
  synthetic peptide
GTVTAFLGIPYAQPPLGRLRFK

SEQ ID NO: 9491 - protein, 22 aa, Artificial sequence
  synthetic peptide
TVTAFLGIPYAQPPLGRLRFKK

SEQ ID NO: 9492 - protein, 22 aa, Artificial sequence
  synthetic peptide
VTAFLGIPYAQPPLGRLRFKKP

SEQ ID NO: 9493 - protein, 22 aa, Artificial sequence
  synthetic peptide
TAFLGIPYAQPPLGRLRFKKPQ

SEQ ID NO: 9494 - protein, 22 aa, Artificial sequence
  synthetic peptide
AFLGIPYAQPPLGRLRFKKPQS

SEQ ID NO: 9495 - protein, 22 aa, Artificial sequence
  synthetic peptide
FLGIPYAQPPLGRLRFKKPQSL

SEQ ID NO: 9496 - protein, 22 aa, Artificial sequence
  synthetic peptide
LGIPYAQPPLGRLRFKKPQSLT

SEQ ID NO: 9497 - protein, 22 aa, Artificial sequence
  synthetic peptide
GIPYAQPPLGRLRFKKPQSLTK

SEQ ID NO: 9498 - protein, 22 aa, Artificial sequence
  synthetic peptide
IPYAQPPLGRLRFKKPQSLTKW

SEQ ID NO: 9499 - protein, 22 aa, Artificial sequence
  synthetic peptide
PYAQPPLGRLRFKKPQSLTKWS

SEQ ID NO: 9500 - protein, 22 aa, Artificial sequence
  synthetic peptide
YAQPPLGRLRFKKPQSLTKWSD

SEQ ID NO: 9501 - protein, 22 aa, Artificial sequence
  synthetic peptide
AQPPLGRLRFKKPQSLTKWSDI

SEQ ID NO: 9502 - protein, 22 aa, Artificial sequence
  synthetic peptide
QPPLGRLRFKKPQSLTKWSDIW

SEQ ID NO: 9503 - protein, 22 aa, Artificial sequence
  synthetic peptide
PPLGRLRFKKPQSLTKWSDIWN

SEQ ID NO: 9504 - protein, 22 aa, Artificial sequence
  synthetic peptide
PLGRLRFKKPQSLTKWSDIWNA

SEQ ID NO: 9505 - protein, 22 aa, Artificial sequence
  synthetic peptide
LGRLRFKKPQSLTKWSDIWNAT

SEQ ID NO: 9506 - protein, 22 aa, Artificial sequence
  synthetic peptide
GRLRFKKPQSLTKWSDIWNATK

SEQ ID NO: 9507 - protein, 22 aa, Artificial sequence
  synthetic peptide
RLRFKKPQSLTKWSDIWNATKY

SEQ ID NO: 9508 - protein, 22 aa, Artificial sequence
  synthetic peptide
LRFKKPQSLTKWSDIWNATKYA

SEQ ID NO: 9509 - protein, 22 aa, Artificial sequence
  synthetic peptide
RFKKPQSLTKWSDIWNATKYAN

SEQ ID NO: 9510 - protein, 22 aa, Artificial sequence
  synthetic peptide
FKKPQSLTKWSDIWNATKYANS

SEQ ID NO: 9511 - protein, 22 aa, Artificial sequence
  synthetic peptide
KKPQSLTKWSDIWNATKYANSC

SEQ ID NO: 9512 - protein, 22 aa, Artificial sequence
  synthetic peptide
KPQSLTKWSDIWNATKYANSCC

SEQ ID NO: 9513 - protein, 22 aa, Artificial sequence
  synthetic peptide
PQSLTKWSDIWNATKYANSCCQ

SEQ ID NO: 9514 - protein, 22 aa, Artificial sequence
  synthetic peptide
QSLTKWSDIWNATKYANSCCQN

SEQ ID NO: 9515 - protein, 22 aa, Artificial sequence
  synthetic peptide
SLTKWSDIWNATKYANSCCQNI

SEQ ID NO: 9516 - protein, 22 aa, Artificial sequence
  synthetic peptide
LTKWSDIWNATKYANSCCQNID

SEQ ID NO: 9517 - protein, 22 aa, Artificial sequence
  synthetic peptide
TKWSDIWNATKYANSCCQNIDQ

SEQ ID NO: 9518 - protein, 22 aa, Artificial sequence
  synthetic peptide
KWSDIWNATKYANSCCQNIDQS

SEQ ID NO: 9519 - protein, 22 aa, Artificial sequence
  synthetic peptide
WSDIWNATKYANSCCQNIDQSF

SEQ ID NO: 9520 - protein, 22 aa, Artificial sequence
  synthetic peptide
SDIWNATKYANSCCQNIDQSFP

SEQ ID NO: 9521 - protein, 22 aa, Artificial sequence
  synthetic peptide
DIWNATKYANSCCQNIDQSFPG

SEQ ID NO: 9522 - protein, 22 aa, Artificial sequence
  synthetic peptide
IWNATKYANSCCQNIDQSFPGF

SEQ ID NO: 9523 - protein, 22 aa, Artificial sequence
  synthetic peptide
WNATKYANSCCQNIDQSFPGFH

SEQ ID NO: 9524 - protein, 22 aa, Artificial sequence
  synthetic peptide
NATKYANSCCQNIDQSFPGFHG

SEQ ID NO: 9525 - protein, 22 aa, Artificial sequence
  synthetic peptide
ATKYANSCCQNIDQSFPGFHGS

SEQ ID NO: 9526 - protein, 22 aa, Artificial sequence
  synthetic peptide
TKYANSCCQNIDQSFPGFHGSE

SEQ ID NO: 9527 - protein, 22 aa, Artificial sequence
  synthetic peptide
KYANSCCQNIDQSFPGFHGSEM

SEQ ID NO: 9528 - protein, 22 aa, Artificial sequence
  synthetic peptide
YANSCCQNIDQSFPGFHGSEMW

SEQ ID NO: 9529 - protein, 22 aa, Artificial sequence
  synthetic peptide
ANSCCQNIDQSFPGFHGSEMWN

SEQ ID NO: 9530 - protein, 22 aa, Artificial sequence
  synthetic peptide
NSCCQNIDQSFPGFHGSEMWNP

SEQ ID NO: 9531 - protein, 22 aa, Artificial sequence
  synthetic peptide
SCCQNIDQSFPGFHGSEMWNPN

SEQ ID NO: 9532 - protein, 22 aa, Artificial sequence
  synthetic peptide
CCQNIDQSFPGFHGSEMWNPNT

SEQ ID NO: 9533 - protein, 22 aa, Artificial sequence
  synthetic peptide
CQNIDQSFPGFHGSEMWNPNTD

SEQ ID NO: 9534 - protein, 22 aa, Artificial sequence
  synthetic peptide
QNIDQSFPGFHGSEMWNPNTDL

SEQ ID NO: 9535 - protein, 22 aa, Artificial sequence
  synthetic peptide
NIDQSFPGFHGSEMWNPNTDLS

SEQ ID NO: 9536 - protein, 22 aa, Artificial sequence
  synthetic peptide
IDQSFPGFHGSEMWNPNTDLSE

SEQ ID NO: 9537 - protein, 22 aa, Artificial sequence
  synthetic peptide
DQSFPGFHGSEMWNPNTDLSED

SEQ ID NO: 9538 - protein, 22 aa, Artificial sequence
  synthetic peptide
QSFPGFHGSEMWNPNTDLSEDC

SEQ ID NO: 9539 - protein, 22 aa, Artificial sequence
  synthetic peptide
SFPGFHGSEMWNPNTDLSEDCL

SEQ ID NO: 9540 - protein, 22 aa, Artificial sequence
  synthetic peptide
FPGFHGSEMWNPNTDLSEDCLY

SEQ ID NO: 9541 - protein, 22 aa, Artificial sequence
  synthetic peptide
PGFHGSEMWNPNTDLSEDCLYL

SEQ ID NO: 9542 - protein, 22 aa, Artificial sequence
  synthetic peptide
GFHGSEMWNPNTDLSEDCLYLN

SEQ ID NO: 9543 - protein, 22 aa, Artificial sequence
  synthetic peptide
FHGSEMWNPNTDLSEDCLYLNV

SEQ ID NO: 9544 - protein, 22 aa, Artificial sequence
  synthetic peptide
HGSEMWNPNTDLSEDCLYLNVW

SEQ ID NO: 9545 - protein, 22 aa, Artificial sequence
  synthetic peptide
GSEMWNPNTDLSEDCLYLNVWI

SEQ ID NO: 9546 - protein, 22 aa, Artificial sequence
  synthetic peptide
SEMWNPNTDLSEDCLYLNVWIP

SEQ ID NO: 9547 - protein, 22 aa, Artificial sequence
  synthetic peptide
EMWNPNTDLSEDCLYLNVWIPA

SEQ ID NO: 9548 - protein, 22 aa, Artificial sequence
  synthetic peptide
MWNPNTDLSEDCLYLNVWIPAP

SEQ ID NO: 9549 - protein, 22 aa, Artificial sequence
  synthetic peptide
WNPNTDLSEDCLYLNVWIPAPK

SEQ ID NO: 9550 - protein, 22 aa, Artificial sequence
  synthetic peptide
NPNTDLSEDCLYLNVWIPAPKP

SEQ ID NO: 9551 - protein, 22 aa, Artificial sequence
  synthetic peptide
PNTDLSEDCLYLNVWIPAPKPK

SEQ ID NO: 9552 - protein, 22 aa, Artificial sequence
  synthetic peptide
NTDLSEDCLYLNVWIPAPKPKN

SEQ ID NO: 9553 - protein, 22 aa, Artificial sequence
  synthetic peptide
TDLSEDCLYLNVWIPAPKPKNA

SEQ ID NO: 9554 - protein, 22 aa, Artificial sequence
  synthetic peptide
DLSEDCLYLNVWIPAPKPKNAT

SEQ ID NO: 9555 - protein, 22 aa, Artificial sequence
  synthetic peptide
LSEDCLYLNVWIPAPKPKNATV

SEQ ID NO: 9556 - protein, 22 aa, Artificial sequence
  synthetic peptide
SEDCLYLNVWIPAPKPKNATVL

SEQ ID NO: 9557 - protein, 22 aa, Artificial sequence
  synthetic peptide
EDCLYLNVWIPAPKPKNATVLI

SEQ ID NO: 9558 - protein, 22 aa, Artificial sequence
  synthetic peptide
DCLYLNVWIPAPKPKNATVLIW

SEQ ID NO: 9559 - protein, 22 aa, Artificial sequence
  synthetic peptide
CLYLNVWIPAPKPKNATVLIWI

SEQ ID NO: 9560 - protein, 22 aa, Artificial sequence
  synthetic peptide
LYLNVWIPAPKPKNATVLIWIY

SEQ ID NO: 9561 - protein, 22 aa, Artificial sequence
  synthetic peptide
YLNVWIPAPKPKNATVLIWIYG

SEQ ID NO: 9562 - protein, 22 aa, Artificial sequence
  synthetic peptide
LNVWIPAPKPKNATVLIWIYGG

SEQ ID NO: 9563 - protein, 22 aa, Artificial sequence
  synthetic peptide
NVWIPAPKPKNATVLIWIYGGG

SEQ ID NO: 9564 - protein, 22 aa, Artificial sequence
  synthetic peptide
VWIPAPKPKNATVLIWIYGGGF

SEQ ID NO: 9565 - protein, 22 aa, Artificial sequence
  synthetic peptide
WIPAPKPKNATVLIWIYGGGFQ

SEQ ID NO: 9566 - protein, 22 aa, Artificial sequence
  synthetic peptide
IPAPKPKNATVLIWIYGGGFQT

SEQ ID NO: 9567 - protein, 22 aa, Artificial sequence
  synthetic peptide
PAPKPKNATVLIWIYGGGFQTG

SEQ ID NO: 9568 - protein, 22 aa, Artificial sequence
  synthetic peptide
APKPKNATVLIWIYGGGFQTGT

SEQ ID NO: 9569 - protein, 22 aa, Artificial sequence
  synthetic peptide
PKPKNATVLIWIYGGGFQTGTS

SEQ ID NO: 9570 - protein, 22 aa, Artificial sequence
  synthetic peptide
KPKNATVLIWIYGGGFQTGTSS

SEQ ID NO: 9571 - protein, 22 aa, Artificial sequence
  synthetic peptide
PKNATVLIWIYGGGFQTGTSSL

SEQ ID NO: 9572 - protein, 22 aa, Artificial sequence
  synthetic peptide
KNATVLIWIYGGGFQTGTSSLH

SEQ ID NO: 9573 - protein, 22 aa, Artificial sequence
  synthetic peptide
NATVLIWIYGGGFQTGTSSLHV

SEQ ID NO: 9574 - protein, 22 aa, Artificial sequence
  synthetic peptide
ATVLIWIYGGGFQTGTSSLHVY

SEQ ID NO: 9575 - protein, 22 aa, Artificial sequence
  synthetic peptide
TVLIWIYGGGFQTGTSSLHVYD

SEQ ID NO: 9576 - protein, 22 aa, Artificial sequence
  synthetic peptide
VLIWIYGGGFQTGTSSLHVYDG

SEQ ID NO: 9577 - protein, 22 aa, Artificial sequence
  synthetic peptide
LIWIYGGGFQTGTSSLHVYDGK

SEQ ID NO: 9578 - protein, 22 aa, Artificial sequence
  synthetic peptide
IWIYGGGFQTGTSSLHVYDGKF

SEQ ID NO: 9579 - protein, 22 aa, Artificial sequence
  synthetic peptide
WIYGGGFQTGTSSLHVYDGKFL

SEQ ID NO: 9580 - protein, 22 aa, Artificial sequence
  synthetic peptide
IYGGGFQTGTSSLHVYDGKFLA

SEQ ID NO: 9581 - protein, 22 aa, Artificial sequence
  synthetic peptide
YGGGFQTGTSSLHVYDGKFLAR

SEQ ID NO: 9582 - protein, 22 aa, Artificial sequence
  synthetic peptide
GGGFQTGTSSLHVYDGKFLARV

SEQ ID NO: 9583 - protein, 22 aa, Artificial sequence
  synthetic peptide
GGFQTGTSSLHVYDGKFLARVE

SEQ ID NO: 9584 - protein, 22 aa, Artificial sequence
  synthetic peptide
GFQTGTSSLHVYDGKFLARVER

SEQ ID NO: 9585 - protein, 22 aa, Artificial sequence
  synthetic peptide
FQTGTSSLHVYDGKFLARVERV

SEQ ID NO: 9586 - protein, 22 aa, Artificial sequence
  synthetic peptide
QTGTSSLHVYDGKFLARVERVI

SEQ ID NO: 9587 - protein, 22 aa, Artificial sequence
  synthetic peptide
TGTSSLHVYDGKFLARVERVIV

SEQ ID NO: 9588 - protein, 22 aa, Artificial sequence
  synthetic peptide
GTSSLHVYDGKFLARVERVIVV

SEQ ID NO: 9589 - protein, 22 aa, Artificial sequence
  synthetic peptide
TSSLHVYDGKFLARVERVIVVS

SEQ ID NO: 9590 - protein, 22 aa, Artificial sequence
  synthetic peptide
SSLHVYDGKFLARVERVIVVSM

SEQ ID NO: 9591 - protein, 22 aa, Artificial sequence
  synthetic peptide
SLHVYDGKFLARVERVIVVSMN

SEQ ID NO: 9592 - protein, 22 aa, Artificial sequence
  synthetic peptide
LHVYDGKFLARVERVIVVSMNY

SEQ ID NO: 9593 - protein, 22 aa, Artificial sequence
  synthetic peptide
HVYDGKFLARVERVIVVSMNYR

SEQ ID NO: 9594 - protein, 22 aa, Artificial sequence
  synthetic peptide
VYDGKFLARVERVIVVSMNYRV

SEQ ID NO: 9595 - protein, 22 aa, Artificial sequence
  synthetic peptide
YDGKFLARVERVIVVSMNYRVG

SEQ ID NO: 9596 - protein, 22 aa, Artificial sequence
  synthetic peptide
DGKFLARVERVIVVSMNYRVGA

SEQ ID NO: 9597 - protein, 22 aa, Artificial sequence
  synthetic peptide
GKFLARVERVIVVSMNYRVGAL

SEQ ID NO: 9598 - protein, 22 aa, Artificial sequence
  synthetic peptide
KFLARVERVIVVSMNYRVGALG

SEQ ID NO: 9599 - protein, 22 aa, Artificial sequence
  synthetic peptide
FLARVERVIVVSMNYRVGALGF

SEQ ID NO: 9600 - protein, 22 aa, Artificial sequence
  synthetic peptide
LARVERVIVVSMNYRVGALGFL

SEQ ID NO: 9601 - protein, 22 aa, Artificial sequence
  synthetic peptide
ARVERVIVVSMNYRVGALGFLA

SEQ ID NO: 9602 - protein, 22 aa, Artificial sequence
  synthetic peptide
RVERVIVVSMNYRVGALGFLAL

SEQ ID NO: 9603 - protein, 22 aa, Artificial sequence
  synthetic peptide
VERVIVVSMNYRVGALGFLALP

SEQ ID NO: 9604 - protein, 22 aa, Artificial sequence
  synthetic peptide
ERVIVVSMNYRVGALGFLALPG

SEQ ID NO: 9605 - protein, 22 aa, Artificial sequence
  synthetic peptide
RVIVVSMNYRVGALGFLALPGN

SEQ ID NO: 9606 - protein, 22 aa, Artificial sequence
  synthetic peptide
VIVVSMNYRVGALGFLALPGNP

SEQ ID NO: 9607 - protein, 22 aa, Artificial sequence
  synthetic peptide
IVVSMNYRVGALGFLALPGNPE

SEQ ID NO: 9608 - protein, 22 aa, Artificial sequence
  synthetic peptide
VVSMNYRVGALGFLALPGNPEA

SEQ ID NO: 9609 - protein, 22 aa, Artificial sequence
  synthetic peptide
VSMNYRVGALGFLALPGNPEAP

SEQ ID NO: 9610 - protein, 22 aa, Artificial sequence
  synthetic peptide
SMNYRVGALGFLALPGNPEAPG

SEQ ID NO: 9611 - protein, 22 aa, Artificial sequence
  synthetic peptide
MNYRVGALGFLALPGNPEAPGN

SEQ ID NO: 9612 - protein, 22 aa, Artificial sequence
  synthetic peptide
NYRVGALGFLALPGNPEAPGNM

SEQ ID NO: 9613 - protein, 22 aa, Artificial sequence
  synthetic peptide
YRVGALGFLALPGNPEAPGNMG

SEQ ID NO: 9614 - protein, 22 aa, Artificial sequence
  synthetic peptide
RVGALGFLALPGNPEAPGNMGL

SEQ ID NO: 9615 - protein, 22 aa, Artificial sequence
  synthetic peptide
VGALGFLALPGNPEAPGNMGLF

SEQ ID NO: 9616 - protein, 22 aa, Artificial sequence
  synthetic peptide
GALGFLALPGNPEAPGNMGLFD

SEQ ID NO: 9617 - protein, 22 aa, Artificial sequence
  synthetic peptide
ALGFLALPGNPEAPGNMGLFDQ

SEQ ID NO: 9618 - protein, 22 aa, Artificial sequence
  synthetic peptide
LGFLALPGNPEAPGNMGLFDQQ

SEQ ID NO: 9619 - protein, 22 aa, Artificial sequence
  synthetic peptide
GFLALPGNPEAPGNMGLFDQQL

SEQ ID NO: 9620 - protein, 22 aa, Artificial sequence
  synthetic peptide
FLALPGNPEAPGNMGLFDQQLA

SEQ ID NO: 9621 - protein, 22 aa, Artificial sequence
  synthetic peptide
LALPGNPEAPGNMGLFDQQLAL

SEQ ID NO: 9622 - protein, 22 aa, Artificial sequence
  synthetic peptide
ALPGNPEAPGNMGLFDQQLALQ

SEQ ID NO: 9623 - protein, 22 aa, Artificial sequence
  synthetic peptide
LPGNPEAPGNMGLFDQQLALQW

SEQ ID NO: 9624 - protein, 22 aa, Artificial sequence
  synthetic peptide
PGNPEAPGNMGLFDQQLALQWV

SEQ ID NO: 9625 - protein, 22 aa, Artificial sequence
  synthetic peptide
GNPEAPGNMGLFDQQLALQWVQ

SEQ ID NO: 9626 - protein, 22 aa, Artificial sequence
  synthetic peptide
NPEAPGNMGLFDQQLALQWVQK

SEQ ID NO: 9627 - protein, 22 aa, Artificial sequence
  synthetic peptide
PEAPGNMGLFDQQLALQWVQKN

SEQ ID NO: 9628 - protein, 22 aa, Artificial sequence
  synthetic peptide
EAPGNMGLFDQQLALQWVQKNI

SEQ ID NO: 9629 - protein, 22 aa, Artificial sequence
  synthetic peptide
APGNMGLFDQQLALQWVQKNIA

SEQ ID NO: 9630 - protein, 22 aa, Artificial sequence
  synthetic peptide
PGNMGLFDQQLALQWVQKNIAA

SEQ ID NO: 9631 - protein, 22 aa, Artificial sequence
  synthetic peptide
GNMGLFDQQLALQWVQKNIAAF

SEQ ID NO: 9632 - protein, 22 aa, Artificial sequence
  synthetic peptide
NMGLFDQQLALQWVQKNIAAFG

SEQ ID NO: 9633 - protein, 22 aa, Artificial sequence
  synthetic peptide
MGLFDQQLALQWVQKNIAAFGG

SEQ ID NO: 9634 - protein, 22 aa, Artificial sequence
  synthetic peptide
GLFDQQLALQWVQKNIAAFGGN

SEQ ID NO: 9635 - protein, 22 aa, Artificial sequence
  synthetic peptide
LFDQQLALQWVQKNIAAFGGNP

SEQ ID NO: 9636 - protein, 22 aa, Artificial sequence
  synthetic peptide
FDQQLALQWVQKNIAAFGGNPK

SEQ ID NO: 9637 - protein, 22 aa, Artificial sequence
  synthetic peptide
DQQLALQWVQKNIAAFGGNPKS

SEQ ID NO: 9638 - protein, 22 aa, Artificial sequence
  synthetic peptide
QQLALQWVQKNIAAFGGNPKSV

SEQ ID NO: 9639 - protein, 22 aa, Artificial sequence
  synthetic peptide
QLALQWVQKNIAAFGGNPKSVT

SEQ ID NO: 9640 - protein, 22 aa, Artificial sequence
  synthetic peptide
LALQWVQKNIAAFGGNPKSVTL

SEQ ID NO: 9641 - protein, 22 aa, Artificial sequence
  synthetic peptide
ALQWVQKNIAAFGGNPKSVTLF

SEQ ID NO: 9642 - protein, 22 aa, Artificial sequence
  synthetic peptide
LQWVQKNIAAFGGNPKSVTLFG

SEQ ID NO: 9643 - protein, 22 aa, Artificial sequence
  synthetic peptide
QWVQKNIAAFGGNPKSVTLFGE

SEQ ID NO: 9644 - protein, 22 aa, Artificial sequence
  synthetic peptide
WVQKNIAAFGGNPKSVTLFGES

SEQ ID NO: 9645 - protein, 22 aa, Artificial sequence
  synthetic peptide
VQKNIAAFGGNPKSVTLFGESA

SEQ ID NO: 9646 - protein, 22 aa, Artificial sequence
  synthetic peptide
QKNIAAFGGNPKSVTLFGESAG

SEQ ID NO: 9647 - protein, 22 aa, Artificial sequence
  synthetic peptide
KNIAAFGGNPKSVTLFGESAGA

SEQ ID NO: 9648 - protein, 22 aa, Artificial sequence
  synthetic peptide
NIAAFGGNPKSVTLFGESAGAA

SEQ ID NO: 9649 - protein, 22 aa, Artificial sequence
  synthetic peptide
IAAFGGNPKSVTLFGESAGAAS

SEQ ID NO: 9650 - protein, 22 aa, Artificial sequence
  synthetic peptide
AAFGGNPKSVTLFGESAGAASV

SEQ ID NO: 9651 - protein, 22 aa, Artificial sequence
  synthetic peptide
AFGGNPKSVTLFGESAGAASVS

SEQ ID NO: 9652 - protein, 22 aa, Artificial sequence
  synthetic peptide
FGGNPKSVTLFGESAGAASVSL

SEQ ID NO: 9653 - protein, 22 aa, Artificial sequence
  synthetic peptide
GGNPKSVTLFGESAGAASVSLH

SEQ ID NO: 9654 - protein, 22 aa, Artificial sequence
  synthetic peptide
GNPKSVTLFGESAGAASVSLHL

SEQ ID NO: 9655 - protein, 22 aa, Artificial sequence
  synthetic peptide
NPKSVTLFGESAGAASVSLHLL

SEQ ID NO: 9656 - protein, 22 aa, Artificial sequence
  synthetic peptide
PKSVTLFGESAGAASVSLHLLS

SEQ ID NO: 9657 - protein, 22 aa, Artificial sequence
  synthetic peptide
KSVTLFGESAGAASVSLHLLSP

SEQ ID NO: 9658 - protein, 22 aa, Artificial sequence
  synthetic peptide
SVTLFGESAGAASVSLHLLSPG

SEQ ID NO: 9659 - protein, 22 aa, Artificial sequence
  synthetic peptide
VTLFGESAGAASVSLHLLSPGS

SEQ ID NO: 9660 - protein, 22 aa, Artificial sequence
  synthetic peptide
TLFGESAGAASVSLHLLSPGSH

SEQ ID NO: 9661 - protein, 22 aa, Artificial sequence
  synthetic peptide
LFGESAGAASVSLHLLSPGSHS

SEQ ID NO: 9662 - protein, 22 aa, Artificial sequence
  synthetic peptide
FGESAGAASVSLHLLSPGSHSL

SEQ ID NO: 9663 - protein, 22 aa, Artificial sequence
  synthetic peptide
GESAGAASVSLHLLSPGSHSLF

SEQ ID NO: 9664 - protein, 22 aa, Artificial sequence
  synthetic peptide
ESAGAASVSLHLLSPGSHSLFT

SEQ ID NO: 9665 - protein, 22 aa, Artificial sequence
  synthetic peptide
SAGAASVSLHLLSPGSHSLFTR

SEQ ID NO: 9666 - protein, 22 aa, Artificial sequence
  synthetic peptide
AGAASVSLHLLSPGSHSLFTRA

SEQ ID NO: 9667 - protein, 22 aa, Artificial sequence
  synthetic peptide
GAASVSLHLLSPGSHSLFTRAI

SEQ ID NO: 9668 - protein, 22 aa, Artificial sequence
  synthetic peptide
AASVSLHLLSPGSHSLFTRAIL

SEQ ID NO: 9669 - protein, 22 aa, Artificial sequence
  synthetic peptide
ASVSLHLLSPGSHSLFTRAILQ

SEQ ID NO: 9670 - protein, 22 aa, Artificial sequence
  synthetic peptide
SVSLHLLSPGSHSLFTRAILQS

SEQ ID NO: 9671 - protein, 22 aa, Artificial sequence
  synthetic peptide
VSLHLLSPGSHSLFTRAILQSG

SEQ ID NO: 9672 - protein, 22 aa, Artificial sequence
  synthetic peptide
SLHLLSPGSHSLFTRAILQSGS

SEQ ID NO: 9673 - protein, 22 aa, Artificial sequence
  synthetic peptide
LHLLSPGSHSLFTRAILQSGSF

SEQ ID NO: 9674 - protein, 22 aa, Artificial sequence
  synthetic peptide
HLLSPGSHSLFTRAILQSGSFN

SEQ ID NO: 9675 - protein, 22 aa, Artificial sequence
  synthetic peptide
LLSPGSHSLFTRAILQSGSFNA

SEQ ID NO: 9676 - protein, 22 aa, Artificial sequence
  synthetic peptide
LSPGSHSLFTRAILQSGSFNAP

SEQ ID NO: 9677 - protein, 22 aa, Artificial sequence
  synthetic peptide
SPGSHSLFTRAILQSGSFNAPW

SEQ ID NO: 9678 - protein, 22 aa, Artificial sequence
  synthetic peptide
PGSHSLFTRAILQSGSFNAPWA

SEQ ID NO: 9679 - protein, 22 aa, Artificial sequence
  synthetic peptide
GSHSLFTRAILQSGSFNAPWAV

SEQ ID NO: 9680 - protein, 22 aa, Artificial sequence
  synthetic peptide
SHSLFTRAILQSGSFNAPWAVT

SEQ ID NO: 9681 - protein, 22 aa, Artificial sequence
  synthetic peptide
HSLFTRAILQSGSFNAPWAVTS

SEQ ID NO: 9682 - protein, 22 aa, Artificial sequence
  synthetic peptide
SLFTRAILQSGSFNAPWAVTSL

SEQ ID NO: 9683 - protein, 22 aa, Artificial sequence
  synthetic peptide
LFTRAILQSGSFNAPWAVTSLY

SEQ ID NO: 9684 - protein, 22 aa, Artificial sequence
  synthetic peptide
FTRAILQSGSFNAPWAVTSLYE

SEQ ID NO: 9685 - protein, 22 aa, Artificial sequence
  synthetic peptide
TRAILQSGSFNAPWAVTSLYEA

SEQ ID NO: 9686 - protein, 22 aa, Artificial sequence
  synthetic peptide
RAILQSGSFNAPWAVTSLYEAR

SEQ ID NO: 9687 - protein, 22 aa, Artificial sequence
  synthetic peptide
AILQSGSFNAPWAVTSLYEARN

SEQ ID NO: 9688 - protein, 22 aa, Artificial sequence
  synthetic peptide
ILQSGSFNAPWAVTSLYEARNR

SEQ ID NO: 9689 - protein, 22 aa, Artificial sequence
  synthetic peptide
LQSGSFNAPWAVTSLYEARNRT

SEQ ID NO: 9690 - protein, 22 aa, Artificial sequence
  synthetic peptide
QSGSFNAPWAVTSLYEARNRTL

SEQ ID NO: 9691 - protein, 22 aa, Artificial sequence
  synthetic peptide
SGSFNAPWAVTSLYEARNRTLN

SEQ ID NO: 9692 - protein, 22 aa, Artificial sequence
  synthetic peptide
GSFNAPWAVTSLYEARNRTLNL

SEQ ID NO: 9693 - protein, 22 aa, Artificial sequence
  synthetic peptide
SFNAPWAVTSLYEARNRTLNLA

SEQ ID NO: 9694 - protein, 22 aa, Artificial sequence
  synthetic peptide
FNAPWAVTSLYEARNRTLNLAK

SEQ ID NO: 9695 - protein, 22 aa, Artificial sequence
  synthetic peptide
NAPWAVTSLYEARNRTLNLAKL

SEQ ID NO: 9696 - protein, 22 aa, Artificial sequence
  synthetic peptide
APWAVTSLYEARNRTLNLAKLT

SEQ ID NO: 9697 - protein, 22 aa, Artificial sequence
  synthetic peptide
PWAVTSLYEARNRTLNLAKLTG

SEQ ID NO: 9698 - protein, 22 aa, Artificial sequence
  synthetic peptide
WAVTSLYEARNRTLNLAKLTGC

SEQ ID NO: 9699 - protein, 22 aa, Artificial sequence
  synthetic peptide
AVTSLYEARNRTLNLAKLTGCS

SEQ ID NO: 9700 - protein, 22 aa, Artificial sequence
  synthetic peptide
VTSLYEARNRTLNLAKLTGCSR

SEQ ID NO: 9701 - protein, 22 aa, Artificial sequence
  synthetic peptide
TSLYEARNRTLNLAKLTGCSRE

SEQ ID NO: 9702 - protein, 22 aa, Artificial sequence
  synthetic peptide
SLYEARNRTLNLAKLTGCSREN

SEQ ID NO: 9703 - protein, 22 aa, Artificial sequence
  synthetic peptide
LYEARNRTLNLAKLTGCSRENE

SEQ ID NO: 9704 - protein, 22 aa, Artificial sequence
  synthetic peptide
YEARNRTLNLAKLTGCSRENET

SEQ ID NO: 9705 - protein, 22 aa, Artificial sequence
  synthetic peptide
EARNRTLNLAKLTGCSRENETE

SEQ ID NO: 9706 - protein, 22 aa, Artificial sequence
  synthetic peptide
ARNRTLNLAKLTGCSRENETEI

SEQ ID NO: 9707 - protein, 22 aa, Artificial sequence
  synthetic peptide
RNRTLNLAKLTGCSRENETEII

SEQ ID NO: 9708 - protein, 22 aa, Artificial sequence
  synthetic peptide
NRTLNLAKLTGCSRENETEIIK

SEQ ID NO: 9709 - protein, 22 aa, Artificial sequence
  synthetic peptide
RTLNLAKLTGCSRENETEIIKC

SEQ ID NO: 9710 - protein, 22 aa, Artificial sequence
  synthetic peptide
TLNLAKLTGCSRENETEIIKCL

SEQ ID NO: 9711 - protein, 22 aa, Artificial sequence
  synthetic peptide
LNLAKLTGCSRENETEIIKCLR

SEQ ID NO: 9712 - protein, 22 aa, Artificial sequence
  synthetic peptide
NLAKLTGCSRENETEIIKCLRN

SEQ ID NO: 9713 - protein, 22 aa, Artificial sequence
  synthetic peptide
LAKLTGCSRENETEIIKCLRNK

SEQ ID NO: 9714 - protein, 22 aa, Artificial sequence
  synthetic peptide
AKLTGCSRENETEIIKCLRNKD

SEQ ID NO: 9715 - protein, 22 aa, Artificial sequence
  synthetic peptide
KLTGCSRENETEIIKCLRNKDP

SEQ ID NO: 9716 - protein, 22 aa, Artificial sequence
  synthetic peptide
LTGCSRENETEIIKCLRNKDPQ

SEQ ID NO: 9717 - protein, 22 aa, Artificial sequence
  synthetic peptide
TGCSRENETEIIKCLRNKDPQE

SEQ ID NO: 9718 - protein, 22 aa, Artificial sequence
  synthetic peptide
GCSRENETEIIKCLRNKDPQEI

SEQ ID NO: 9719 - protein, 22 aa, Artificial sequence
  synthetic peptide
CSRENETEIIKCLRNKDPQEIL

SEQ ID NO: 9720 - protein, 22 aa, Artificial sequence
  synthetic peptide
SRENETEIIKCLRNKDPQEILL

SEQ ID NO: 9721 - protein, 22 aa, Artificial sequence
  synthetic peptide
RENETEIIKCLRNKDPQEILLN

SEQ ID NO: 9722 - protein, 22 aa, Artificial sequence
  synthetic peptide
ENETEIIKCLRNKDPQEILLNE

SEQ ID NO: 9723 - protein, 22 aa, Artificial sequence
  synthetic peptide
NETEIIKCLRNKDPQEILLNEA

SEQ ID NO: 9724 - protein, 22 aa, Artificial sequence
  synthetic peptide
ETEIIKCLRNKDPQEILLNEAF

SEQ ID NO: 9725 - protein, 22 aa, Artificial sequence
  synthetic peptide
TEIIKCLRNKDPQEILLNEAFV

SEQ ID NO: 9726 - protein, 22 aa, Artificial sequence
  synthetic peptide
EIIKCLRNKDPQEILLNEAFVV

SEQ ID NO: 9727 - protein, 22 aa, Artificial sequence
  synthetic peptide
IIKCLRNKDPQEILLNEAFVVP

SEQ ID NO: 9728 - protein, 22 aa, Artificial sequence
  synthetic peptide
IKCLRNKDPQEILLNEAFVVPY

SEQ ID NO: 9729 - protein, 22 aa, Artificial sequence
  synthetic peptide
KCLRNKDPQEILLNEAFVVPYG

SEQ ID NO: 9730 - protein, 22 aa, Artificial sequence
  synthetic peptide
CLRNKDPQEILLNEAFVVPYGT

SEQ ID NO: 9731 - protein, 22 aa, Artificial sequence
  synthetic peptide
LRNKDPQEILLNEAFVVPYGTP

SEQ ID NO: 9732 - protein, 22 aa, Artificial sequence
  synthetic peptide
RNKDPQEILLNEAFVVPYGTPL

SEQ ID NO: 9733 - protein, 22 aa, Artificial sequence
  synthetic peptide
NKDPQEILLNEAFVVPYGTPLS

SEQ ID NO: 9734 - protein, 22 aa, Artificial sequence
  synthetic peptide
KDPQEILLNEAFVVPYGTPLSV

SEQ ID NO: 9735 - protein, 22 aa, Artificial sequence
  synthetic peptide
DPQEILLNEAFVVPYGTPLSVN

SEQ ID NO: 9736 - protein, 22 aa, Artificial sequence
  synthetic peptide
PQEILLNEAFVVPYGTPLSVNF

SEQ ID NO: 9737 - protein, 22 aa, Artificial sequence
  synthetic peptide
QEILLNEAFVVPYGTPLSVNFG

SEQ ID NO: 9738 - protein, 22 aa, Artificial sequence
  synthetic peptide
EILLNEAFVVPYGTPLSVNFGP

SEQ ID NO: 9739 - protein, 22 aa, Artificial sequence
  synthetic peptide
ILLNEAFVVPYGTPLSVNFGPT

SEQ ID NO: 9740 - protein, 22 aa, Artificial sequence
  synthetic peptide
LLNEAFVVPYGTPLSVNFGPTV

SEQ ID NO: 9741 - protein, 22 aa, Artificial sequence
  synthetic peptide
LNEAFVVPYGTPLSVNFGPTVD

SEQ ID NO: 9742 - protein, 22 aa, Artificial sequence
  synthetic peptide
NEAFVVPYGTPLSVNFGPTVDG

SEQ ID NO: 9743 - protein, 22 aa, Artificial sequence
  synthetic peptide
EAFVVPYGTPLSVNFGPTVDGD

SEQ ID NO: 9744 - protein, 22 aa, Artificial sequence
  synthetic peptide
AFVVPYGTPLSVNFGPTVDGDF

SEQ ID NO: 9745 - protein, 22 aa, Artificial sequence
  synthetic peptide
FVVPYGTPLSVNFGPTVDGDFL

SEQ ID NO: 9746 - protein, 22 aa, Artificial sequence
  synthetic peptide
VVPYGTPLSVNFGPTVDGDFLT

SEQ ID NO: 9747 - protein, 22 aa, Artificial sequence
  synthetic peptide
VPYGTPLSVNFGPTVDGDFLTD

SEQ ID NO: 9748 - protein, 22 aa, Artificial sequence
  synthetic peptide
PYGTPLSVNFGPTVDGDFLTDM

SEQ ID NO: 9749 - protein, 22 aa, Artificial sequence
  synthetic peptide
YGTPLSVNFGPTVDGDFLTDMP

SEQ ID NO: 9750 - protein, 22 aa, Artificial sequence
  synthetic peptide
GTPLSVNFGPTVDGDFLTDMPD

SEQ ID NO: 9751 - protein, 22 aa, Artificial sequence
  synthetic peptide
TPLSVNFGPTVDGDFLTDMPDI

SEQ ID NO: 9752 - protein, 22 aa, Artificial sequence
  synthetic peptide
PLSVNFGPTVDGDFLTDMPDIL

SEQ ID NO: 9753 - protein, 22 aa, Artificial sequence
  synthetic peptide
LSVNFGPTVDGDFLTDMPDILL

SEQ ID NO: 9754 - protein, 22 aa, Artificial sequence
  synthetic peptide
SVNFGPTVDGDFLTDMPDILLE

SEQ ID NO: 9755 - protein, 22 aa, Artificial sequence
  synthetic peptide
VNFGPTVDGDFLTDMPDILLEL

SEQ ID NO: 9756 - protein, 22 aa, Artificial sequence
  synthetic peptide
NFGPTVDGDFLTDMPDILLELG

SEQ ID NO: 9757 - protein, 22 aa, Artificial sequence
  synthetic peptide
FGPTVDGDFLTDMPDILLELGQ

SEQ ID NO: 9758 - protein, 22 aa, Artificial sequence
  synthetic peptide
GPTVDGDFLTDMPDILLELGQF

SEQ ID NO: 9759 - protein, 22 aa, Artificial sequence
  synthetic peptide
PTVDGDFLTDMPDILLELGQFK

SEQ ID NO: 9760 - protein, 22 aa, Artificial sequence
  synthetic peptide
TVDGDFLTDMPDILLELGQFKK

SEQ ID NO: 9761 - protein, 22 aa, Artificial sequence
  synthetic peptide
VDGDFLTDMPDILLELGQFKKT

SEQ ID NO: 9762 - protein, 22 aa, Artificial sequence
  synthetic peptide
DGDFLTDMPDILLELGQFKKTQ

SEQ ID NO: 9763 - protein, 22 aa, Artificial sequence
  synthetic peptide
GDFLTDMPDILLELGQFKKTQI

SEQ ID NO: 9764 - protein, 22 aa, Artificial sequence
  synthetic peptide
DFLTDMPDILLELGQFKKTQIL

SEQ ID NO: 9765 - protein, 22 aa, Artificial sequence
  synthetic peptide
FLTDMPDILLELGQFKKTQILV

SEQ ID NO: 9766 - protein, 22 aa, Artificial sequence
  synthetic peptide
LTDMPDILLELGQFKKTQILVG

SEQ ID NO: 9767 - protein, 22 aa, Artificial sequence
  synthetic peptide
TDMPDILLELGQFKKTQILVGV

SEQ ID NO: 9768 - protein, 22 aa, Artificial sequence
  synthetic peptide
DMPDILLELGQFKKTQILVGVN

SEQ ID NO: 9769 - protein, 22 aa, Artificial sequence
  synthetic peptide
MPDILLELGQFKKTQILVGVNK

SEQ ID NO: 9770 - protein, 22 aa, Artificial sequence
  synthetic peptide
PDILLELGQFKKTQILVGVNKD

SEQ ID NO: 9771 - protein, 22 aa, Artificial sequence
  synthetic peptide
DILLELGQFKKTQILVGVNKDE

SEQ ID NO: 9772 - protein, 22 aa, Artificial sequence
  synthetic peptide
ILLELGQFKKTQILVGVNKDEG

SEQ ID NO: 9773 - protein, 22 aa, Artificial sequence
  synthetic peptide
LLELGQFKKTQILVGVNKDEGT

SEQ ID NO: 9774 - protein, 22 aa, Artificial sequence
  synthetic peptide
LELGQFKKTQILVGVNKDEGTA

SEQ ID NO: 9775 - protein, 22 aa, Artificial sequence
  synthetic peptide
ELGQFKKTQILVGVNKDEGTAF

SEQ ID NO: 9776 - protein, 22 aa, Artificial sequence
  synthetic peptide
LGQFKKTQILVGVNKDEGTAFL

SEQ ID NO: 9777 - protein, 22 aa, Artificial sequence
  synthetic peptide
GQFKKTQILVGVNKDEGTAFLV

SEQ ID NO: 9778 - protein, 22 aa, Artificial sequence
  synthetic peptide
QFKKTQILVGVNKDEGTAFLVY

SEQ ID NO: 9779 - protein, 22 aa, Artificial sequence
  synthetic peptide
FKKTQILVGVNKDEGTAFLVYG

SEQ ID NO: 9780 - protein, 22 aa, Artificial sequence
  synthetic peptide
KKTQILVGVNKDEGTAFLVYGA

SEQ ID NO: 9781 - protein, 22 aa, Artificial sequence
  synthetic peptide
KTQILVGVNKDEGTAFLVYGAP

SEQ ID NO: 9782 - protein, 22 aa, Artificial sequence
  synthetic peptide
TQILVGVNKDEGTAFLVYGAPG

SEQ ID NO: 9783 - protein, 22 aa, Artificial sequence
  synthetic peptide
QILVGVNKDEGTAFLVYGAPGF

SEQ ID NO: 9784 - protein, 22 aa, Artificial sequence
  synthetic peptide
ILVGVNKDEGTAFLVYGAPGFS

SEQ ID NO: 9785 - protein, 22 aa, Artificial sequence
  synthetic peptide
LVGVNKDEGTAFLVYGAPGFSK

SEQ ID NO: 9786 - protein, 22 aa, Artificial sequence
  synthetic peptide
VGVNKDEGTAFLVYGAPGFSKD

SEQ ID NO: 9787 - protein, 22 aa, Artificial sequence
  synthetic peptide
GVNKDEGTAFLVYGAPGFSKDN

SEQ ID NO: 9788 - protein, 22 aa, Artificial sequence
  synthetic peptide
VNKDEGTAFLVYGAPGFSKDNN

SEQ ID NO: 9789 - protein, 22 aa, Artificial sequence
  synthetic peptide
NKDEGTAFLVYGAPGFSKDNNS

SEQ ID NO: 9790 - protein, 22 aa, Artificial sequence
  synthetic peptide
KDEGTAFLVYGAPGFSKDNNSI

SEQ ID NO: 9791 - protein, 22 aa, Artificial sequence
  synthetic peptide
DEGTAFLVYGAPGFSKDNNSII

SEQ ID NO: 9792 - protein, 22 aa, Artificial sequence
  synthetic peptide
EGTAFLVYGAPGFSKDNNSIIT

SEQ ID NO: 9793 - protein, 22 aa, Artificial sequence
  synthetic peptide
GTAFLVYGAPGFSKDNNSIITR

SEQ ID NO: 9794 - protein, 22 aa, Artificial sequence
  synthetic peptide
TAFLVYGAPGFSKDNNSIITRK

SEQ ID NO: 9795 - protein, 22 aa, Artificial sequence
  synthetic peptide
AFLVYGAPGFSKDNNSIITRKE

SEQ ID NO: 9796 - protein, 22 aa, Artificial sequence
  synthetic peptide
FLVYGAPGFSKDNNSIITRKEF

SEQ ID NO: 9797 - protein, 22 aa, Artificial sequence
  synthetic peptide
LVYGAPGFSKDNNSIITRKEFQ

SEQ ID NO: 9798 - protein, 22 aa, Artificial sequence
  synthetic peptide
VYGAPGFSKDNNSIITRKEFQE

SEQ ID NO: 9799 - protein, 22 aa, Artificial sequence
  synthetic peptide
YGAPGFSKDNNSIITRKEFQEG

SEQ ID NO: 9800 - protein, 22 aa, Artificial sequence
  synthetic peptide
GAPGFSKDNNSIITRKEFQEGL

SEQ ID NO: 9801 - protein, 22 aa, Artificial sequence
  synthetic peptide
APGFSKDNNSIITRKEFQEGLK

SEQ ID NO: 9802 - protein, 22 aa, Artificial sequence
  synthetic peptide
PGFSKDNNSIITRKEFQEGLKI

SEQ ID NO: 9803 - protein, 22 aa, Artificial sequence
  synthetic peptide
GFSKDNNSIITRKEFQEGLKIF

SEQ ID NO: 9804 - protein, 22 aa, Artificial sequence
  synthetic peptide
FSKDNNSIITRKEFQEGLKIFF

SEQ ID NO: 9805 - protein, 22 aa, Artificial sequence
  synthetic peptide
SKDNNSIITRKEFQEGLKIFFP

SEQ ID NO: 9806 - protein, 22 aa, Artificial sequence
  synthetic peptide
KDNNSIITRKEFQEGLKIFFPG

SEQ ID NO: 9807 - protein, 22 aa, Artificial sequence
  synthetic peptide
DNNSIITRKEFQEGLKIFFPGV

SEQ ID NO: 9808 - protein, 22 aa, Artificial sequence
  synthetic peptide
NNSIITRKEFQEGLKIFFPGVS

SEQ ID NO: 9809 - protein, 22 aa, Artificial sequence
  synthetic peptide
NSIITRKEFQEGLKIFFPGVSE

SEQ ID NO: 9810 - protein, 22 aa, Artificial sequence
  synthetic peptide
SIITRKEFQEGLKIFFPGVSEF

SEQ ID NO: 9811 - protein, 22 aa, Artificial sequence
  synthetic peptide
IITRKEFQEGLKIFFPGVSEFG

SEQ ID NO: 9812 - protein, 22 aa, Artificial sequence
  synthetic peptide
ITRKEFQEGLKIFFPGVSEFGK

SEQ ID NO: 9813 - protein, 22 aa, Artificial sequence
  synthetic peptide
TRKEFQEGLKIFFPGVSEFGKE

SEQ ID NO: 9814 - protein, 22 aa, Artificial sequence
  synthetic peptide
RKEFQEGLKIFFPGVSEFGKES

SEQ ID NO: 9815 - protein, 22 aa, Artificial sequence
  synthetic peptide
KEFQEGLKIFFPGVSEFGKESI

SEQ ID NO: 9816 - protein, 22 aa, Artificial sequence
  synthetic peptide
EFQEGLKIFFPGVSEFGKESIL

SEQ ID NO: 9817 - protein, 22 aa, Artificial sequence
  synthetic peptide
FQEGLKIFFPGVSEFGKESILF

SEQ ID NO: 9818 - protein, 22 aa, Artificial sequence
  synthetic peptide
QEGLKIFFPGVSEFGKESILFH

SEQ ID NO: 9819 - protein, 22 aa, Artificial sequence
  synthetic peptide
EGLKIFFPGVSEFGKESILFHY

SEQ ID NO: 9820 - protein, 22 aa, Artificial sequence
  synthetic peptide
GLKIFFPGVSEFGKESILFHYT

SEQ ID NO: 9821 - protein, 22 aa, Artificial sequence
  synthetic peptide
LKIFFPGVSEFGKESILFHYTD

SEQ ID NO: 9822 - protein, 22 aa, Artificial sequence
  synthetic peptide
KIFFPGVSEFGKESILFHYTDW

SEQ ID NO: 9823 - protein, 22 aa, Artificial sequence
  synthetic peptide
IFFPGVSEFGKESILFHYTDWV

SEQ ID NO: 9824 - protein, 22 aa, Artificial sequence
  synthetic peptide
FFPGVSEFGKESILFHYTDWVD

SEQ ID NO: 9825 - protein, 22 aa, Artificial sequence
  synthetic peptide
FPGVSEFGKESILFHYTDWVDD

SEQ ID NO: 9826 - protein, 22 aa, Artificial sequence
  synthetic peptide
PGVSEFGKESILFHYTDWVDDQ

SEQ ID NO: 9827 - protein, 22 aa, Artificial sequence
  synthetic peptide
GVSEFGKESILFHYTDWVDDQR

SEQ ID NO: 9828 - protein, 22 aa, Artificial sequence
  synthetic peptide
VSEFGKESILFHYTDWVDDQRP

SEQ ID NO: 9829 - protein, 22 aa, Artificial sequence
  synthetic peptide
SEFGKESILFHYTDWVDDQRPE

SEQ ID NO: 9830 - protein, 22 aa, Artificial sequence
  synthetic peptide
EFGKESILFHYTDWVDDQRPEN

SEQ ID NO: 9831 - protein, 22 aa, Artificial sequence
  synthetic peptide
FGKESILFHYTDWVDDQRPENY

SEQ ID NO: 9832 - protein, 22 aa, Artificial sequence
  synthetic peptide
GKESILFHYTDWVDDQRPENYR

SEQ ID NO: 9833 - protein, 22 aa, Artificial sequence
  synthetic peptide
KESILFHYTDWVDDQRPENYRE

SEQ ID NO: 9834 - protein, 22 aa, Artificial sequence
  synthetic peptide
ESILFHYTDWVDDQRPENYREA

SEQ ID NO: 9835 - protein, 22 aa, Artificial sequence
  synthetic peptide
SILFHYTDWVDDQRPENYREAL

SEQ ID NO: 9836 - protein, 22 aa, Artificial sequence
  synthetic peptide
ILFHYTDWVDDQRPENYREALG

SEQ ID NO: 9837 - protein, 22 aa, Artificial sequence
  synthetic peptide
LFHYTDWVDDQRPENYREALGD

SEQ ID NO: 9838 - protein, 22 aa, Artificial sequence
  synthetic peptide
FHYTDWVDDQRPENYREALGDV

SEQ ID NO: 9839 - protein, 22 aa, Artificial sequence
  synthetic peptide
HYTDWVDDQRPENYREALGDVV

SEQ ID NO: 9840 - protein, 22 aa, Artificial sequence
  synthetic peptide
YTDWVDDQRPENYREALGDVVG

SEQ ID NO: 9841 - protein, 22 aa, Artificial sequence
  synthetic peptide
TDWVDDQRPENYREALGDVVGD

SEQ ID NO: 9842 - protein, 22 aa, Artificial sequence
  synthetic peptide
DWVDDQRPENYREALGDVVGDY

SEQ ID NO: 9843 - protein, 22 aa, Artificial sequence
  synthetic peptide
WVDDQRPENYREALGDVVGDYN

SEQ ID NO: 9844 - protein, 22 aa, Artificial sequence
  synthetic peptide
VDDQRPENYREALGDVVGDYNF

SEQ ID NO: 9845 - protein, 22 aa, Artificial sequence
  synthetic peptide
DDQRPENYREALGDVVGDYNFI

SEQ ID NO: 9846 - protein, 22 aa, Artificial sequence
  synthetic peptide
DQRPENYREALGDVVGDYNFIC

SEQ ID NO: 9847 - protein, 22 aa, Artificial sequence
  synthetic peptide
QRPENYREALGDVVGDYNFICP

SEQ ID NO: 9848 - protein, 22 aa, Artificial sequence
  synthetic peptide
RPENYREALGDVVGDYNFICPA

SEQ ID NO: 9849 - protein, 22 aa, Artificial sequence
  synthetic peptide
PENYREALGDVVGDYNFICPAL

SEQ ID NO: 9850 - protein, 22 aa, Artificial sequence
  synthetic peptide
ENYREALGDVVGDYNFICPALE

SEQ ID NO: 9851 - protein, 22 aa, Artificial sequence
  synthetic peptide
NYREALGDVVGDYNFICPALEF

SEQ ID NO: 9852 - protein, 22 aa, Artificial sequence
  synthetic peptide
YREALGDVVGDYNFICPALEFT

SEQ ID NO: 9853 - protein, 22 aa, Artificial sequence
  synthetic peptide
REALGDVVGDYNFICPALEFTK

SEQ ID NO: 9854 - protein, 22 aa, Artificial sequence
  synthetic peptide
EALGDVVGDYNFICPALEFTKK

SEQ ID NO: 9855 - protein, 22 aa, Artificial sequence
  synthetic peptide
ALGDVVGDYNFICPALEFTKKF

SEQ ID NO: 9856 - protein, 22 aa, Artificial sequence
  synthetic peptide
LGDVVGDYNFICPALEFTKKFS

SEQ ID NO: 9857 - protein, 22 aa, Artificial sequence
  synthetic peptide
GDVVGDYNFICPALEFTKKFSE

SEQ ID NO: 9858 - protein, 22 aa, Artificial sequence
  synthetic peptide
DVVGDYNFICPALEFTKKFSEW

SEQ ID NO: 9859 - protein, 22 aa, Artificial sequence
  synthetic peptide
VVGDYNFICPALEFTKKFSEWG

SEQ ID NO: 9860 - protein, 22 aa, Artificial sequence
  synthetic peptide
VGDYNFICPALEFTKKFSEWGN

SEQ ID NO: 9861 - protein, 22 aa, Artificial sequence
  synthetic peptide
GDYNFICPALEFTKKFSEWGNN

SEQ ID NO: 9862 - protein, 22 aa, Artificial sequence
  synthetic peptide
DYNFICPALEFTKKFSEWGNNA

SEQ ID NO: 9863 - protein, 22 aa, Artificial sequence
  synthetic peptide
YNFICPALEFTKKFSEWGNNAF

SEQ ID NO: 9864 - protein, 22 aa, Artificial sequence
  synthetic peptide
NFICPALEFTKKFSEWGNNAFF

SEQ ID NO: 9865 - protein, 22 aa, Artificial sequence
  synthetic peptide
FICPALEFTKKFSEWGNNAFFY

SEQ ID NO: 9866 - protein, 22 aa, Artificial sequence
  synthetic peptide
ICPALEFTKKFSEWGNNAFFYY

SEQ ID NO: 9867 - protein, 22 aa, Artificial sequence
  synthetic peptide
CPALEFTKKFSEWGNNAFFYYF

SEQ ID NO: 9868 - protein, 22 aa, Artificial sequence
  synthetic peptide
PALEFTKKFSEWGNNAFFYYFE

SEQ ID NO: 9869 - protein, 22 aa, Artificial sequence
  synthetic peptide
ALEFTKKFSEWGNNAFFYYFEH

SEQ ID NO: 9870 - protein, 22 aa, Artificial sequence
  synthetic peptide
LEFTKKFSEWGNNAFFYYFEHR

SEQ ID NO: 9871 - protein, 22 aa, Artificial sequence
  synthetic peptide
EFTKKFSEWGNNAFFYYFEHRS

SEQ ID NO: 9872 - protein, 22 aa, Artificial sequence
  synthetic peptide
FTKKFSEWGNNAFFYYFEHRSS

SEQ ID NO: 9873 - protein, 22 aa, Artificial sequence
  synthetic peptide
TKKFSEWGNNAFFYYFEHRSSK

SEQ ID NO: 9874 - protein, 22 aa, Artificial sequence
  synthetic peptide
KKFSEWGNNAFFYYFEHRSSKL

SEQ ID NO: 9875 - protein, 22 aa, Artificial sequence
  synthetic peptide
KFSEWGNNAFFYYFEHRSSKLP

SEQ ID NO: 9876 - protein, 22 aa, Artificial sequence
  synthetic peptide
FSEWGNNAFFYYFEHRSSKLPW

SEQ ID NO: 9877 - protein, 22 aa, Artificial sequence
  synthetic peptide
SEWGNNAFFYYFEHRSSKLPWP

SEQ ID NO: 9878 - protein, 22 aa, Artificial sequence
  synthetic peptide
EWGNNAFFYYFEHRSSKLPWPE

SEQ ID NO: 9879 - protein, 22 aa, Artificial sequence
  synthetic peptide
WGNNAFFYYFEHRSSKLPWPEW

SEQ ID NO: 9880 - protein, 22 aa, Artificial sequence
  synthetic peptide
GNNAFFYYFEHRSSKLPWPEWM

SEQ ID NO: 9881 - protein, 22 aa, Artificial sequence
  synthetic peptide
NNAFFYYFEHRSSKLPWPEWMG

SEQ ID NO: 9882 - protein, 22 aa, Artificial sequence
  synthetic peptide
NAFFYYFEHRSSKLPWPEWMGV

SEQ ID NO: 9883 - protein, 22 aa, Artificial sequence
  synthetic peptide
AFFYYFEHRSSKLPWPEWMGVM

SEQ ID NO: 9884 - protein, 22 aa, Artificial sequence
  synthetic peptide
FFYYFEHRSSKLPWPEWMGVMH

SEQ ID NO: 9885 - protein, 22 aa, Artificial sequence
  synthetic peptide
FYYFEHRSSKLPWPEWMGVMHG

SEQ ID NO: 9886 - protein, 22 aa, Artificial sequence
  synthetic peptide
YYFEHRSSKLPWPEWMGVMHGY

SEQ ID NO: 9887 - protein, 22 aa, Artificial sequence
  synthetic peptide
YFEHRSSKLPWPEWMGVMHGYE

SEQ ID NO: 9888 - protein, 22 aa, Artificial sequence
  synthetic peptide
FEHRSSKLPWPEWMGVMHGYEI

SEQ ID NO: 9889 - protein, 22 aa, Artificial sequence
  synthetic peptide
EHRSSKLPWPEWMGVMHGYEIE

SEQ ID NO: 9890 - protein, 22 aa, Artificial sequence
  synthetic peptide
HRSSKLPWPEWMGVMHGYEIEF

SEQ ID NO: 9891 - protein, 22 aa, Artificial sequence
  synthetic peptide
RSSKLPWPEWMGVMHGYEIEFV

SEQ ID NO: 9892 - protein, 22 aa, Artificial sequence
  synthetic peptide
SSKLPWPEWMGVMHGYEIEFVF

SEQ ID NO: 9893 - protein, 22 aa, Artificial sequence
  synthetic peptide
SKLPWPEWMGVMHGYEIEFVFG

SEQ ID NO: 9894 - protein, 22 aa, Artificial sequence
  synthetic peptide
KLPWPEWMGVMHGYEIEFVFGL

SEQ ID NO: 9895 - protein, 22 aa, Artificial sequence
  synthetic peptide
LPWPEWMGVMHGYEIEFVFGLP

SEQ ID NO: 9896 - protein, 22 aa, Artificial sequence
  synthetic peptide
PWPEWMGVMHGYEIEFVFGLPL

SEQ ID NO: 9897 - protein, 22 aa, Artificial sequence
  synthetic peptide
WPEWMGVMHGYEIEFVFGLPLE

SEQ ID NO: 9898 - protein, 22 aa, Artificial sequence
  synthetic peptide
PEWMGVMHGYEIEFVFGLPLER

SEQ ID NO: 9899 - protein, 22 aa, Artificial sequence
  synthetic peptide
EWMGVMHGYEIEFVFGLPLERR

SEQ ID NO: 9900 - protein, 22 aa, Artificial sequence
  synthetic peptide
WMGVMHGYEIEFVFGLPLERRD

SEQ ID NO: 9901 - protein, 22 aa, Artificial sequence
  synthetic peptide
MGVMHGYEIEFVFGLPLERRDN

SEQ ID NO: 9902 - protein, 22 aa, Artificial sequence
  synthetic peptide
GVMHGYEIEFVFGLPLERRDNY

SEQ ID NO: 9903 - protein, 22 aa, Artificial sequence
  synthetic peptide
VMHGYEIEFVFGLPLERRDNYT

SEQ ID NO: 9904 - protein, 22 aa, Artificial sequence
  synthetic peptide
MHGYEIEFVFGLPLERRDNYTK

SEQ ID NO: 9905 - protein, 22 aa, Artificial sequence
  synthetic peptide
HGYEIEFVFGLPLERRDNYTKA

SEQ ID NO: 9906 - protein, 22 aa, Artificial sequence
  synthetic peptide
GYEIEFVFGLPLERRDNYTKAE

SEQ ID NO: 9907 - protein, 22 aa, Artificial sequence
  synthetic peptide
YEIEFVFGLPLERRDNYTKAEE

SEQ ID NO: 9908 - protein, 22 aa, Artificial sequence
  synthetic peptide
EIEFVFGLPLERRDNYTKAEEI

SEQ ID NO: 9909 - protein, 22 aa, Artificial sequence
  synthetic peptide
IEFVFGLPLERRDNYTKAEEIL

SEQ ID NO: 9910 - protein, 22 aa, Artificial sequence
  synthetic peptide
EFVFGLPLERRDNYTKAEEILS

SEQ ID NO: 9911 - protein, 22 aa, Artificial sequence
  synthetic peptide
FVFGLPLERRDNYTKAEEILSR

SEQ ID NO: 9912 - protein, 22 aa, Artificial sequence
  synthetic peptide
VFGLPLERRDNYTKAEEILSRS

SEQ ID NO: 9913 - protein, 22 aa, Artificial sequence
  synthetic peptide
FGLPLERRDNYTKAEEILSRSI

SEQ ID NO: 9914 - protein, 22 aa, Artificial sequence
  synthetic peptide
GLPLERRDNYTKAEEILSRSIV

SEQ ID NO: 9915 - protein, 22 aa, Artificial sequence
  synthetic peptide
LPLERRDNYTKAEEILSRSIVK

SEQ ID NO: 9916 - protein, 22 aa, Artificial sequence
  synthetic peptide
PLERRDNYTKAEEILSRSIVKR

SEQ ID NO: 9917 - protein, 22 aa, Artificial sequence
  synthetic peptide
LERRDNYTKAEEILSRSIVKRW

SEQ ID NO: 9918 - protein, 22 aa, Artificial sequence
  synthetic peptide
ERRDNYTKAEEILSRSIVKRWA

SEQ ID NO: 9919 - protein, 22 aa, Artificial sequence
  synthetic peptide
RRDNYTKAEEILSRSIVKRWAN

SEQ ID NO: 9920 - protein, 22 aa, Artificial sequence
  synthetic peptide
RDNYTKAEEILSRSIVKRWANF

SEQ ID NO: 9921 - protein, 22 aa, Artificial sequence
  synthetic peptide
DNYTKAEEILSRSIVKRWANFA

SEQ ID NO: 9922 - protein, 22 aa, Artificial sequence
  synthetic peptide
NYTKAEEILSRSIVKRWANFAK

SEQ ID NO: 9923 - protein, 22 aa, Artificial sequence
  synthetic peptide
YTKAEEILSRSIVKRWANFAKY

SEQ ID NO: 9924 - protein, 22 aa, Artificial sequence
  synthetic peptide
TKAEEILSRSIVKRWANFAKYG

SEQ ID NO: 9925 - protein, 22 aa, Artificial sequence
  synthetic peptide
KAEEILSRSIVKRWANFAKYGN

SEQ ID NO: 9926 - protein, 22 aa, Artificial sequence
  synthetic peptide
AEEILSRSIVKRWANFAKYGNP

SEQ ID NO: 9927 - protein, 22 aa, Artificial sequence
  synthetic peptide
EEILSRSIVKRWANFAKYGNPN

SEQ ID NO: 9928 - protein, 22 aa, Artificial sequence
  synthetic peptide
EILSRSIVKRWANFAKYGNPNE

SEQ ID NO: 9929 - protein, 22 aa, Artificial sequence
  synthetic peptide
ILSRSIVKRWANFAKYGNPNET

SEQ ID NO: 9930 - protein, 22 aa, Artificial sequence
  synthetic peptide
LSRSIVKRWANFAKYGNPNETQ

SEQ ID NO: 9931 - protein, 22 aa, Artificial sequence
  synthetic peptide
SRSIVKRWANFAKYGNPNETQN

SEQ ID NO: 9932 - protein, 22 aa, Artificial sequence
  synthetic peptide
RSIVKRWANFAKYGNPNETQNN

SEQ ID NO: 9933 - protein, 22 aa, Artificial sequence
  synthetic peptide
SIVKRWANFAKYGNPNETQNNS

SEQ ID NO: 9934 - protein, 22 aa, Artificial sequence
  synthetic peptide
IVKRWANFAKYGNPNETQNNST

SEQ ID NO: 9935 - protein, 22 aa, Artificial sequence
  synthetic peptide
VKRWANFAKYGNPNETQNNSTS

SEQ ID NO: 9936 - protein, 22 aa, Artificial sequence
  synthetic peptide
KRWANFAKYGNPNETQNNSTSW

SEQ ID NO: 9937 - protein, 22 aa, Artificial sequence
  synthetic peptide
RWANFAKYGNPNETQNNSTSWP

SEQ ID NO: 9938 - protein, 22 aa, Artificial sequence
  synthetic peptide
WANFAKYGNPNETQNNSTSWPV

SEQ ID NO: 9939 - protein, 22 aa, Artificial sequence
  synthetic peptide
ANFAKYGNPNETQNNSTSWPVF

SEQ ID NO: 9940 - protein, 22 aa, Artificial sequence
  synthetic peptide
NFAKYGNPNETQNNSTSWPVFK

SEQ ID NO: 9941 - protein, 22 aa, Artificial sequence
  synthetic peptide
FAKYGNPNETQNNSTSWPVFKS

SEQ ID NO: 9942 - protein, 22 aa, Artificial sequence
  synthetic peptide
AKYGNPNETQNNSTSWPVFKST

SEQ ID NO: 9943 - protein, 22 aa, Artificial sequence
  synthetic peptide
KYGNPNETQNNSTSWPVFKSTE

SEQ ID NO: 9944 - protein, 22 aa, Artificial sequence
  synthetic peptide
YGNPNETQNNSTSWPVFKSTEQ

SEQ ID NO: 9945 - protein, 22 aa, Artificial sequence
  synthetic peptide
GNPNETQNNSTSWPVFKSTEQK

SEQ ID NO: 9946 - protein, 22 aa, Artificial sequence
  synthetic peptide
NPNETQNNSTSWPVFKSTEQKY

SEQ ID NO: 9947 - protein, 22 aa, Artificial sequence
  synthetic peptide
PNETQNNSTSWPVFKSTEQKYL

SEQ ID NO: 9948 - protein, 22 aa, Artificial sequence
  synthetic peptide
NETQNNSTSWPVFKSTEQKYLT

SEQ ID NO: 9949 - protein, 22 aa, Artificial sequence
  synthetic peptide
ETQNNSTSWPVFKSTEQKYLTL

SEQ ID NO: 9950 - protein, 22 aa, Artificial sequence
  synthetic peptide
TQNNSTSWPVFKSTEQKYLTLN

SEQ ID NO: 9951 - protein, 22 aa, Artificial sequence
  synthetic peptide
QNNSTSWPVFKSTEQKYLTLNT

SEQ ID NO: 9952 - protein, 22 aa, Artificial sequence
  synthetic peptide
NNSTSWPVFKSTEQKYLTLNTE

SEQ ID NO: 9953 - protein, 22 aa, Artificial sequence
  synthetic peptide
NSTSWPVFKSTEQKYLTLNTES

SEQ ID NO: 9954 - protein, 22 aa, Artificial sequence
  synthetic peptide
STSWPVFKSTEQKYLTLNTEST

SEQ ID NO: 9955 - protein, 22 aa, Artificial sequence
  synthetic peptide
TSWPVFKSTEQKYLTLNTESTR

SEQ ID NO: 9956 - protein, 22 aa, Artificial sequence
  synthetic peptide
SWPVFKSTEQKYLTLNTESTRI

SEQ ID NO: 9957 - protein, 22 aa, Artificial sequence
  synthetic peptide
WPVFKSTEQKYLTLNTESTRIM

SEQ ID NO: 9958 - protein, 22 aa, Artificial sequence
  synthetic peptide
PVFKSTEQKYLTLNTESTRIMT

SEQ ID NO: 9959 - protein, 22 aa, Artificial sequence
  synthetic peptide
VFKSTEQKYLTLNTESTRIMTK

SEQ ID NO: 9960 - protein, 22 aa, Artificial sequence
  synthetic peptide
FKSTEQKYLTLNTESTRIMTKL

SEQ ID NO: 9961 - protein, 22 aa, Artificial sequence
  synthetic peptide
KSTEQKYLTLNTESTRIMTKLR

SEQ ID NO: 9962 - protein, 22 aa, Artificial sequence
  synthetic peptide
STEQKYLTLNTESTRIMTKLRA

SEQ ID NO: 9963 - protein, 22 aa, Artificial sequence
  synthetic peptide
TEQKYLTLNTESTRIMTKLRAQ

SEQ ID NO: 9964 - protein, 22 aa, Artificial sequence
  synthetic peptide
EQKYLTLNTESTRIMTKLRAQQ

SEQ ID NO: 9965 - protein, 22 aa, Artificial sequence
  synthetic peptide
QKYLTLNTESTRIMTKLRAQQC

SEQ ID NO: 9966 - protein, 22 aa, Artificial sequence
  synthetic peptide
KYLTLNTESTRIMTKLRAQQCR

SEQ ID NO: 9967 - protein, 22 aa, Artificial sequence
  synthetic peptide
YLTLNTESTRIMTKLRAQQCRF

SEQ ID NO: 9968 - protein, 22 aa, Artificial sequence
  synthetic peptide
LTLNTESTRIMTKLRAQQCRFW

SEQ ID NO: 9969 - protein, 22 aa, Artificial sequence
  synthetic peptide
TLNTESTRIMTKLRAQQCRFWT

SEQ ID NO: 9970 - protein, 22 aa, Artificial sequence
  synthetic peptide
LNTESTRIMTKLRAQQCRFWTS

SEQ ID NO: 9971 - protein, 22 aa, Artificial sequence
  synthetic peptide
NTESTRIMTKLRAQQCRFWTSF

SEQ ID NO: 9972 - protein, 22 aa, Artificial sequence
  synthetic peptide
TESTRIMTKLRAQQCRFWTSFF

SEQ ID NO: 9973 - protein, 22 aa, Artificial sequence
  synthetic peptide
ESTRIMTKLRAQQCRFWTSFFP

SEQ ID NO: 9974 - protein, 22 aa, Artificial sequence
  synthetic peptide
STRIMTKLRAQQCRFWTSFFPK

SEQ ID NO: 9975 - protein, 22 aa, Artificial sequence
  synthetic peptide
TRIMTKLRAQQCRFWTSFFPKV

SEQ ID NO: 9976 - protein, 22 aa, Artificial sequence
  synthetic peptide
RIMTKLRAQQCRFWTSFFPKVL

SEQ ID NO: 9977 - protein, 22 aa, Artificial sequence
  synthetic peptide
IMTKLRAQQCRFWTSFFPKVLE

SEQ ID NO: 9978 - protein, 22 aa, Artificial sequence
  synthetic peptide
MTKLRAQQCRFWTSFFPKVLEM

SEQ ID NO: 9979 - protein, 22 aa, Artificial sequence
  synthetic peptide
TKLRAQQCRFWTSFFPKVLEMT

SEQ ID NO: 9980 - protein, 22 aa, Artificial sequence
  synthetic peptide
KLRAQQCRFWTSFFPKVLEMTG

SEQ ID NO: 9981 - protein, 22 aa, Artificial sequence
  synthetic peptide
LRAQQCRFWTSFFPKVLEMTGN

SEQ ID NO: 9982 - protein, 22 aa, Artificial sequence
  synthetic peptide
RAQQCRFWTSFFPKVLEMTGNI

SEQ ID NO: 9983 - protein, 22 aa, Artificial sequence
  synthetic peptide
AQQCRFWTSFFPKVLEMTGNID

SEQ ID NO: 9984 - protein, 22 aa, Artificial sequence
  synthetic peptide
QQCRFWTSFFPKVLEMTGNIDE

SEQ ID NO: 9985 - protein, 22 aa, Artificial sequence
  synthetic peptide
QCRFWTSFFPKVLEMTGNIDEA

SEQ ID NO: 9986 - protein, 22 aa, Artificial sequence
  synthetic peptide
CRFWTSFFPKVLEMTGNIDEAE

SEQ ID NO: 9987 - protein, 22 aa, Artificial sequence
  synthetic peptide
RFWTSFFPKVLEMTGNIDEAEW

SEQ ID NO: 9988 - protein, 22 aa, Artificial sequence
  synthetic peptide
FWTSFFPKVLEMTGNIDEAEWE

SEQ ID NO: 9989 - protein, 22 aa, Artificial sequence
  synthetic peptide
WTSFFPKVLEMTGNIDEAEWEW

SEQ ID NO: 9990 - protein, 22 aa, Artificial sequence
  synthetic peptide
TSFFPKVLEMTGNIDEAEWEWK

SEQ ID NO: 9991 - protein, 22 aa, Artificial sequence
  synthetic peptide
SFFPKVLEMTGNIDEAEWEWKA

SEQ ID NO: 9992 - protein, 22 aa, Artificial sequence
  synthetic peptide
FFPKVLEMTGNIDEAEWEWKAG

SEQ ID NO: 9993 - protein, 22 aa, Artificial sequence
  synthetic peptide
FPKVLEMTGNIDEAEWEWKAGF

SEQ ID NO: 9994 - protein, 22 aa, Artificial sequence
  synthetic peptide
PKVLEMTGNIDEAEWEWKAGFH

SEQ ID NO: 9995 - protein, 22 aa, Artificial sequence
  synthetic peptide
KVLEMTGNIDEAEWEWKAGFHR

SEQ ID NO: 9996 - protein, 22 aa, Artificial sequence
  synthetic peptide
VLEMTGNIDEAEWEWKAGFHRW

SEQ ID NO: 9997 - protein, 22 aa, Artificial sequence
  synthetic peptide
LEMTGNIDEAEWEWKAGFHRWN

SEQ ID NO: 9998 - protein, 22 aa, Artificial sequence
  synthetic peptide
EMTGNIDEAEWEWKAGFHRWNN

SEQ ID NO: 9999 - protein, 22 aa, Artificial sequence
  synthetic peptide
MTGNIDEAEWEWKAGFHRWNNY

SEQ ID NO: 10000 - protein, 22 aa, Artificial sequence
  synthetic peptide
TGNIDEAEWEWKAGFHRWNNYM

SEQ ID NO: 10001 - protein, 22 aa, Artificial sequence
  synthetic peptide
GNIDEAEWEWKAGFHRWNNYMM

SEQ ID NO: 10002 - protein, 22 aa, Artificial sequence
  synthetic peptide
NIDEAEWEWKAGFHRWNNYMMD

SEQ ID NO: 10003 - protein, 22 aa, Artificial sequence
  synthetic peptide
IDEAEWEWKAGFHRWNNYMMDW

SEQ ID NO: 10004 - protein, 22 aa, Artificial sequence
  synthetic peptide
DEAEWEWKAGFHRWNNYMMDWK

SEQ ID NO: 10005 - protein, 22 aa, Artificial sequence
  synthetic peptide
EAEWEWKAGFHRWNNYMMDWKN

SEQ ID NO: 10006 - protein, 22 aa, Artificial sequence
  synthetic peptide
AEWEWKAGFHRWNNYMMDWKNQ

SEQ ID NO: 10007 - protein, 22 aa, Artificial sequence
  synthetic peptide
EWEWKAGFHRWNNYMMDWKNQF

SEQ ID NO: 10008 - protein, 22 aa, Artificial sequence
  synthetic peptide
WEWKAGFHRWNNYMMDWKNQFN

SEQ ID NO: 10009 - protein, 22 aa, Artificial sequence
  synthetic peptide
EWKAGFHRWNNYMMDWKNQFND

SEQ ID NO: 10010 - protein, 22 aa, Artificial sequence
  synthetic peptide
WKAGFHRWNNYMMDWKNQFNDY

SEQ ID NO: 10011 - protein, 22 aa, Artificial sequence
  synthetic peptide
KAGFHRWNNYMMDWKNQFNDYT

SEQ ID NO: 10012 - protein, 22 aa, Artificial sequence
  synthetic peptide
AGFHRWNNYMMDWKNQFNDYTS

SEQ ID NO: 10013 - protein, 22 aa, Artificial sequence
  synthetic peptide
GFHRWNNYMMDWKNQFNDYTSK

SEQ ID NO: 10014 - protein, 22 aa, Artificial sequence
  synthetic peptide
FHRWNNYMMDWKNQFNDYTSKK

SEQ ID NO: 10015 - protein, 22 aa, Artificial sequence
  synthetic peptide
HRWNNYMMDWKNQFNDYTSKKE

SEQ ID NO: 10016 - protein, 22 aa, Artificial sequence
  synthetic peptide
RWNNYMMDWKNQFNDYTSKKES

SEQ ID NO: 10017 - protein, 22 aa, Artificial sequence
  synthetic peptide
WNNYMMDWKNQFNDYTSKKESC

SEQ ID NO: 10018 - protein, 22 aa, Artificial sequence
  synthetic peptide
NNYMMDWKNQFNDYTSKKESCV

SEQ ID NO: 10019 - protein, 22 aa, Artificial sequence
  synthetic peptide
NYMMDWKNQFNDYTSKKESCVG

SEQ ID NO: 10020 - protein, 22 aa, Artificial sequence
  synthetic peptide
YMMDWKNQFNDYTSKKESCVGL

SEQ ID NO: 10021 - protein, 23 aa, Artificial sequence
  synthetic peptide
MHSKVTIICIRFLFWFLLLCMLI

SEQ ID NO: 10022 - protein, 23 aa, Artificial sequence
  synthetic peptide
HSKVTIICIRFLFWFLLLCMLIG

SEQ ID NO: 10023 - protein, 23 aa, Artificial sequence
  synthetic peptide
SKVTIICIRFLFWFLLLCMLIGK

SEQ ID NO: 10024 - protein, 23 aa, Artificial sequence
  synthetic peptide
KVTIICIRFLFWFLLLCMLIGKS

SEQ ID NO: 10025 - protein, 23 aa, Artificial sequence
  synthetic peptide
VTIICIRFLFWFLLLCMLIGKSH

SEQ ID NO: 10026 - protein, 23 aa, Artificial sequence
  synthetic peptide
TIICIRFLFWFLLLCMLIGKSHT

SEQ ID NO: 10027 - protein, 23 aa, Artificial sequence
  synthetic peptide
IICIRFLFWFLLLCMLIGKSHTE

SEQ ID NO: 10028 - protein, 23 aa, Artificial sequence
  synthetic peptide
ICIRFLFWFLLLCMLIGKSHTED

SEQ ID NO: 10029 - protein, 23 aa, Artificial sequence
  synthetic peptide
CIRFLFWFLLLCMLIGKSHTEDD

SEQ ID NO: 10030 - protein, 23 aa, Artificial sequence
  synthetic peptide
IRFLFWFLLLCMLIGKSHTEDDI

SEQ ID NO: 10031 - protein, 23 aa, Artificial sequence
  synthetic peptide
RFLFWFLLLCMLIGKSHTEDDII

SEQ ID NO: 10032 - protein, 23 aa, Artificial sequence
  synthetic peptide
FLFWFLLLCMLIGKSHTEDDIII

SEQ ID NO: 10033 - protein, 23 aa, Artificial sequence
  synthetic peptide
LFWFLLLCMLIGKSHTEDDIIIA

SEQ ID NO: 10034 - protein, 23 aa, Artificial sequence
  synthetic peptide
FWFLLLCMLIGKSHTEDDIIIAT

SEQ ID NO: 10035 - protein, 23 aa, Artificial sequence
  synthetic peptide
WFLLLCMLIGKSHTEDDIIIATK

SEQ ID NO: 10036 - protein, 23 aa, Artificial sequence
  synthetic peptide
FLLLCMLIGKSHTEDDIIIATKN

SEQ ID NO: 10037 - protein, 23 aa, Artificial sequence
  synthetic peptide
LLLCMLIGKSHTEDDIIIATKNG

SEQ ID NO: 10038 - protein, 23 aa, Artificial sequence
  synthetic peptide
LLCMLIGKSHTEDDIIIATKNGK

SEQ ID NO: 10039 - protein, 23 aa, Artificial sequence
  synthetic peptide
LCMLIGKSHTEDDIIIATKNGKV

SEQ ID NO: 10040 - protein, 23 aa, Artificial sequence
  synthetic peptide
CMLIGKSHTEDDIIIATKNGKVR

SEQ ID NO: 10041 - protein, 23 aa, Artificial sequence
  synthetic peptide
MLIGKSHTEDDIIIATKNGKVRG

SEQ ID NO: 10042 - protein, 23 aa, Artificial sequence
  synthetic peptide
LIGKSHTEDDIIIATKNGKVRGM

SEQ ID NO: 10043 - protein, 23 aa, Artificial sequence
  synthetic peptide
IGKSHTEDDIIIATKNGKVRGMN

SEQ ID NO: 10044 - protein, 23 aa, Artificial sequence
  synthetic peptide
GKSHTEDDIIIATKNGKVRGMNL

SEQ ID NO: 10045 - protein, 23 aa, Artificial sequence
  synthetic peptide
KSHTEDDIIIATKNGKVRGMNLT

SEQ ID NO: 10046 - protein, 23 aa, Artificial sequence
  synthetic peptide
SHTEDDIIIATKNGKVRGMNLTV

SEQ ID NO: 10047 - protein, 23 aa, Artificial sequence
  synthetic peptide
HTEDDIIIATKNGKVRGMNLTVF

SEQ ID NO: 10048 - protein, 23 aa, Artificial sequence
  synthetic peptide
TEDDIIIATKNGKVRGMNLTVFG

SEQ ID NO: 10049 - protein, 23 aa, Artificial sequence
  synthetic peptide
EDDIIIATKNGKVRGMNLTVFGG

SEQ ID NO: 10050 - protein, 23 aa, Artificial sequence
  synthetic peptide
DDIIIATKNGKVRGMNLTVFGGT

SEQ ID NO: 10051 - protein, 23 aa, Artificial sequence
  synthetic peptide
DIIIATKNGKVRGMNLTVFGGTV

SEQ ID NO: 10052 - protein, 23 aa, Artificial sequence
  synthetic peptide
IIIATKNGKVRGMNLTVFGGTVT

SEQ ID NO: 10053 - protein, 23 aa, Artificial sequence
  synthetic peptide
IIATKNGKVRGMNLTVFGGTVTA

SEQ ID NO: 10054 - protein, 23 aa, Artificial sequence
  synthetic peptide
IATKNGKVRGMNLTVFGGTVTAF

SEQ ID NO: 10055 - protein, 23 aa, Artificial sequence
  synthetic peptide
ATKNGKVRGMNLTVFGGTVTAFL

SEQ ID NO: 10056 - protein, 23 aa, Artificial sequence
  synthetic peptide
TKNGKVRGMNLTVFGGTVTAFLG

SEQ ID NO: 10057 - protein, 23 aa, Artificial sequence
  synthetic peptide
KNGKVRGMNLTVFGGTVTAFLGI

SEQ ID NO: 10058 - protein, 23 aa, Artificial sequence
  synthetic peptide
NGKVRGMNLTVFGGTVTAFLGIP

SEQ ID NO: 10059 - protein, 23 aa, Artificial sequence
  synthetic peptide
GKVRGMNLTVFGGTVTAFLGIPY

SEQ ID NO: 10060 - protein, 23 aa, Artificial sequence
  synthetic peptide
KVRGMNLTVFGGTVTAFLGIPYA

SEQ ID NO: 10061 - protein, 23 aa, Artificial sequence
  synthetic peptide
VRGMNLTVFGGTVTAFLGIPYAQ

SEQ ID NO: 10062 - protein, 23 aa, Artificial sequence
  synthetic peptide
RGMNLTVFGGTVTAFLGIPYAQP

SEQ ID NO: 10063 - protein, 23 aa, Artificial sequence
  synthetic peptide
GMNLTVFGGTVTAFLGIPYAQPP

SEQ ID NO: 10064 - protein, 23 aa, Artificial sequence
  synthetic peptide
MNLTVFGGTVTAFLGIPYAQPPL

SEQ ID NO: 10065 - protein, 23 aa, Artificial sequence
  synthetic peptide
NLTVFGGTVTAFLGIPYAQPPLG

SEQ ID NO: 10066 - protein, 23 aa, Artificial sequence
  synthetic peptide
LTVFGGTVTAFLGIPYAQPPLGR

SEQ ID NO: 10067 - protein, 23 aa, Artificial sequence
  synthetic peptide
TVFGGTVTAFLGIPYAQPPLGRL

SEQ ID NO: 10068 - protein, 23 aa, Artificial sequence
  synthetic peptide
VFGGTVTAFLGIPYAQPPLGRLR

SEQ ID NO: 10069 - protein, 23 aa, Artificial sequence
  synthetic peptide
FGGTVTAFLGIPYAQPPLGRLRF

SEQ ID NO: 10070 - protein, 23 aa, Artificial sequence
  synthetic peptide
GGTVTAFLGIPYAQPPLGRLRFK

SEQ ID NO: 10071 - protein, 23 aa, Artificial sequence
  synthetic peptide
GTVTAFLGIPYAQPPLGRLRFKK

SEQ ID NO: 10072 - protein, 23 aa, Artificial sequence
  synthetic peptide
TVTAFLGIPYAQPPLGRLRFKKP

SEQ ID NO: 10073 - protein, 23 aa, Artificial sequence
  synthetic peptide
VTAFLGIPYAQPPLGRLRFKKPQ

SEQ ID NO: 10074 - protein, 23 aa, Artificial sequence
  synthetic peptide
TAFLGIPYAQPPLGRLRFKKPQS

SEQ ID NO: 10075 - protein, 23 aa, Artificial sequence
  synthetic peptide
AFLGIPYAQPPLGRLRFKKPQSL

SEQ ID NO: 10076 - protein, 23 aa, Artificial sequence
  synthetic peptide
FLGIPYAQPPLGRLRFKKPQSLT

SEQ ID NO: 10077 - protein, 23 aa, Artificial sequence
  synthetic peptide
LGIPYAQPPLGRLRFKKPQSLTK

SEQ ID NO: 10078 - protein, 23 aa, Artificial sequence
  synthetic peptide
GIPYAQPPLGRLRFKKPQSLTKW

SEQ ID NO: 10079 - protein, 23 aa, Artificial sequence
  synthetic peptide
IPYAQPPLGRLRFKKPQSLTKWS

SEQ ID NO: 10080 - protein, 23 aa, Artificial sequence
  synthetic peptide
PYAQPPLGRLRFKKPQSLTKWSD

SEQ ID NO: 10081 - protein, 23 aa, Artificial sequence
  synthetic peptide
YAQPPLGRLRFKKPQSLTKWSDI

SEQ ID NO: 10082 - protein, 23 aa, Artificial sequence
  synthetic peptide
AQPPLGRLRFKKPQSLTKWSDIW

SEQ ID NO: 10083 - protein, 23 aa, Artificial sequence
  synthetic peptide
QPPLGRLRFKKPQSLTKWSDIWN

SEQ ID NO: 10084 - protein, 23 aa, Artificial sequence
  synthetic peptide
PPLGRLRFKKPQSLTKWSDIWNA

SEQ ID NO: 10085 - protein, 23 aa, Artificial sequence
  synthetic peptide
PLGRLRFKKPQSLTKWSDIWNAT

SEQ ID NO: 10086 - protein, 23 aa, Artificial sequence
  synthetic peptide
LGRLRFKKPQSLTKWSDIWNATK

SEQ ID NO: 10087 - protein, 23 aa, Artificial sequence
  synthetic peptide
GRLRFKKPQSLTKWSDIWNATKY

SEQ ID NO: 10088 - protein, 23 aa, Artificial sequence
  synthetic peptide
RLRFKKPQSLTKWSDIWNATKYA

SEQ ID NO: 10089 - protein, 23 aa, Artificial sequence
  synthetic peptide
LRFKKPQSLTKWSDIWNATKYAN

SEQ ID NO: 10090 - protein, 23 aa, Artificial sequence
  synthetic peptide
RFKKPQSLTKWSDIWNATKYANS

SEQ ID NO: 10091 - protein, 23 aa, Artificial sequence
  synthetic peptide
FKKPQSLTKWSDIWNATKYANSC

SEQ ID NO: 10092 - protein, 23 aa, Artificial sequence
  synthetic peptide
KKPQSLTKWSDIWNATKYANSCC

SEQ ID NO: 10093 - protein, 23 aa, Artificial sequence
  synthetic peptide
KPQSLTKWSDIWNATKYANSCCQ

SEQ ID NO: 10094 - protein, 23 aa, Artificial sequence
  synthetic peptide
PQSLTKWSDIWNATKYANSCCQN

SEQ ID NO: 10095 - protein, 23 aa, Artificial sequence
  synthetic peptide
QSLTKWSDIWNATKYANSCCQNI

SEQ ID NO: 10096 - protein, 23 aa, Artificial sequence
  synthetic peptide
SLTKWSDIWNATKYANSCCQNID

SEQ ID NO: 10097 - protein, 23 aa, Artificial sequence
  synthetic peptide
LTKWSDIWNATKYANSCCQNIDQ

SEQ ID NO: 10098 - protein, 23 aa, Artificial sequence
  synthetic peptide
TKWSDIWNATKYANSCCQNIDQS

SEQ ID NO: 10099 - protein, 23 aa, Artificial sequence
  synthetic peptide
KWSDIWNATKYANSCCQNIDQSF

SEQ ID NO: 10100 - protein, 23 aa, Artificial sequence
  synthetic peptide
WSDIWNATKYANSCCQNIDQSFP

SEQ ID NO: 10101 - protein, 23 aa, Artificial sequence
  synthetic peptide
SDIWNATKYANSCCQNIDQSFPG

SEQ ID NO: 10102 - protein, 23 aa, Artificial sequence
  synthetic peptide
DIWNATKYANSCCQNIDQSFPGF

SEQ ID NO: 10103 - protein, 23 aa, Artificial sequence
  synthetic peptide
IWNATKYANSCCQNIDQSFPGFH

SEQ ID NO: 10104 - protein, 23 aa, Artificial sequence
  synthetic peptide
WNATKYANSCCQNIDQSFPGFHG

SEQ ID NO: 10105 - protein, 23 aa, Artificial sequence
  synthetic peptide
NATKYANSCCQNIDQSFPGFHGS

SEQ ID NO: 10106 - protein, 23 aa, Artificial sequence
  synthetic peptide
ATKYANSCCQNIDQSFPGFHGSE

SEQ ID NO: 10107 - protein, 23 aa, Artificial sequence
  synthetic peptide
TKYANSCCQNIDQSFPGFHGSEM

SEQ ID NO: 10108 - protein, 23 aa, Artificial sequence
  synthetic peptide
KYANSCCQNIDQSFPGFHGSEMW

SEQ ID NO: 10109 - protein, 23 aa, Artificial sequence
  synthetic peptide
YANSCCQNIDQSFPGFHGSEMWN

SEQ ID NO: 10110 - protein, 23 aa, Artificial sequence
  synthetic peptide
ANSCCQNIDQSFPGFHGSEMWNP

SEQ ID NO: 10111 - protein, 23 aa, Artificial sequence
  synthetic peptide
NSCCQNIDQSFPGFHGSEMWNPN

SEQ ID NO: 10112 - protein, 23 aa, Artificial sequence
  synthetic peptide
SCCQNIDQSFPGFHGSEMWNPNT

SEQ ID NO: 10113 - protein, 23 aa, Artificial sequence
  synthetic peptide
CCQNIDQSFPGFHGSEMWNPNTD

SEQ ID NO: 10114 - protein, 23 aa, Artificial sequence
  synthetic peptide
CQNIDQSFPGFHGSEMWNPNTDL

SEQ ID NO: 10115 - protein, 23 aa, Artificial sequence
  synthetic peptide
QNIDQSFPGFHGSEMWNPNTDLS

SEQ ID NO: 10116 - protein, 23 aa, Artificial sequence
  synthetic peptide
NIDQSFPGFHGSEMWNPNTDLSE

SEQ ID NO: 10117 - protein, 23 aa, Artificial sequence
  synthetic peptide
IDQSFPGFHGSEMWNPNTDLSED

SEQ ID NO: 10118 - protein, 23 aa, Artificial sequence
  synthetic peptide
DQSFPGFHGSEMWNPNTDLSEDC

SEQ ID NO: 10119 - protein, 23 aa, Artificial sequence
  synthetic peptide
QSFPGFHGSEMWNPNTDLSEDCL

SEQ ID NO: 10120 - protein, 23 aa, Artificial sequence
  synthetic peptide
SFPGFHGSEMWNPNTDLSEDCLY

SEQ ID NO: 10121 - protein, 23 aa, Artificial sequence
  synthetic peptide
FPGFHGSEMWNPNTDLSEDCLYL

SEQ ID NO: 10122 - protein, 23 aa, Artificial sequence
  synthetic peptide
PGFHGSEMWNPNTDLSEDCLYLN

SEQ ID NO: 10123 - protein, 23 aa, Artificial sequence
  synthetic peptide
GFHGSEMWNPNTDLSEDCLYLNV

SEQ ID NO: 10124 - protein, 23 aa, Artificial sequence
  synthetic peptide
FHGSEMWNPNTDLSEDCLYLNVW

SEQ ID NO: 10125 - protein, 23 aa, Artificial sequence
  synthetic peptide
HGSEMWNPNTDLSEDCLYLNVWI

SEQ ID NO: 10126 - protein, 23 aa, Artificial sequence
  synthetic peptide
GSEMWNPNTDLSEDCLYLNVWIP

SEQ ID NO: 10127 - protein, 23 aa, Artificial sequence
  synthetic peptide
SEMWNPNTDLSEDCLYLNVWIPA

SEQ ID NO: 10128 - protein, 23 aa, Artificial sequence
  synthetic peptide
EMWNPNTDLSEDCLYLNVWIPAP

SEQ ID NO: 10129 - protein, 23 aa, Artificial sequence
  synthetic peptide
MWNPNTDLSEDCLYLNVWIPAPK

SEQ ID NO: 10130 - protein, 23 aa, Artificial sequence
  synthetic peptide
WNPNTDLSEDCLYLNVWIPAPKP

SEQ ID NO: 10131 - protein, 23 aa, Artificial sequence
  synthetic peptide
NPNTDLSEDCLYLNVWIPAPKPK

SEQ ID NO: 10132 - protein, 23 aa, Artificial sequence
  synthetic peptide
PNTDLSEDCLYLNVWIPAPKPKN

SEQ ID NO: 10133 - protein, 23 aa, Artificial sequence
  synthetic peptide
NTDLSEDCLYLNVWIPAPKPKNA

SEQ ID NO: 10134 - protein, 23 aa, Artificial sequence
  synthetic peptide
TDLSEDCLYLNVWIPAPKPKNAT

SEQ ID NO: 10135 - protein, 23 aa, Artificial sequence
  synthetic peptide
DLSEDCLYLNVWIPAPKPKNATV

SEQ ID NO: 10136 - protein, 23 aa, Artificial sequence
  synthetic peptide
LSEDCLYLNVWIPAPKPKNATVL

SEQ ID NO: 10137 - protein, 23 aa, Artificial sequence
  synthetic peptide
SEDCLYLNVWIPAPKPKNATVLI

SEQ ID NO: 10138 - protein, 23 aa, Artificial sequence
  synthetic peptide
EDCLYLNVWIPAPKPKNATVLIW

SEQ ID NO: 10139 - protein, 23 aa, Artificial sequence
  synthetic peptide
DCLYLNVWIPAPKPKNATVLIWI

SEQ ID NO: 10140 - protein, 23 aa, Artificial sequence
  synthetic peptide
CLYLNVWIPAPKPKNATVLIWIY

SEQ ID NO: 10141 - protein, 23 aa, Artificial sequence
  synthetic peptide
LYLNVWIPAPKPKNATVLIWIYG

SEQ ID NO: 10142 - protein, 23 aa, Artificial sequence
  synthetic peptide
YLNVWIPAPKPKNATVLIWIYGG

SEQ ID NO: 10143 - protein, 23 aa, Artificial sequence
  synthetic peptide
LNVWIPAPKPKNATVLIWIYGGG

SEQ ID NO: 10144 - protein, 23 aa, Artificial sequence
  synthetic peptide
NVWIPAPKPKNATVLIWIYGGGF

SEQ ID NO: 10145 - protein, 23 aa, Artificial sequence
  synthetic peptide
VWIPAPKPKNATVLIWIYGGGFQ

SEQ ID NO: 10146 - protein, 23 aa, Artificial sequence
  synthetic peptide
WIPAPKPKNATVLIWIYGGGFQT

SEQ ID NO: 10147 - protein, 23 aa, Artificial sequence
  synthetic peptide
IPAPKPKNATVLIWIYGGGFQTG

SEQ ID NO: 10148 - protein, 23 aa, Artificial sequence
  synthetic peptide
PAPKPKNATVLIWIYGGGFQTGT

SEQ ID NO: 10149 - protein, 23 aa, Artificial sequence
  synthetic peptide
APKPKNATVLIWIYGGGFQTGTS

SEQ ID NO: 10150 - protein, 23 aa, Artificial sequence
  synthetic peptide
PKPKNATVLIWIYGGGFQTGTSS

SEQ ID NO: 10151 - protein, 23 aa, Artificial sequence
  synthetic peptide
KPKNATVLIWIYGGGFQTGTSSL

SEQ ID NO: 10152 - protein, 23 aa, Artificial sequence
  synthetic peptide
PKNATVLIWIYGGGFQTGTSSLH

SEQ ID NO: 10153 - protein, 23 aa, Artificial sequence
  synthetic peptide
KNATVLIWIYGGGFQTGTSSLHV

SEQ ID NO: 10154 - protein, 23 aa, Artificial sequence
  synthetic peptide
NATVLIWIYGGGFQTGTSSLHVY

SEQ ID NO: 10155 - protein, 23 aa, Artificial sequence
  synthetic peptide
ATVLIWIYGGGFQTGTSSLHVYD

SEQ ID NO: 10156 - protein, 23 aa, Artificial sequence
  synthetic peptide
TVLIWIYGGGFQTGTSSLHVYDG

SEQ ID NO: 10157 - protein, 23 aa, Artificial sequence
  synthetic peptide
VLIWIYGGGFQTGTSSLHVYDGK

SEQ ID NO: 10158 - protein, 23 aa, Artificial sequence
  synthetic peptide
LIWIYGGGFQTGTSSLHVYDGKF

SEQ ID NO: 10159 - protein, 23 aa, Artificial sequence
  synthetic peptide
IWIYGGGFQTGTSSLHVYDGKFL

SEQ ID NO: 10160 - protein, 23 aa, Artificial sequence
  synthetic peptide
WIYGGGFQTGTSSLHVYDGKFLA

SEQ ID NO: 10161 - protein, 23 aa, Artificial sequence
  synthetic peptide
IYGGGFQTGTSSLHVYDGKFLAR

SEQ ID NO: 10162 - protein, 23 aa, Artificial sequence
  synthetic peptide
YGGGFQTGTSSLHVYDGKFLARV

SEQ ID NO: 10163 - protein, 23 aa, Artificial sequence
  synthetic peptide
GGGFQTGTSSLHVYDGKFLARVE

SEQ ID NO: 10164 - protein, 23 aa, Artificial sequence
  synthetic peptide
GGFQTGTSSLHVYDGKFLARVER

SEQ ID NO: 10165 - protein, 23 aa, Artificial sequence
  synthetic peptide
GFQTGTSSLHVYDGKFLARVERV

SEQ ID NO: 10166 - protein, 23 aa, Artificial sequence
  synthetic peptide
FQTGTSSLHVYDGKFLARVERVI

SEQ ID NO: 10167 - protein, 23 aa, Artificial sequence
  synthetic peptide
QTGTSSLHVYDGKFLARVERVIV

SEQ ID NO: 10168 - protein, 23 aa, Artificial sequence
  synthetic peptide
TGTSSLHVYDGKFLARVERVIVV

SEQ ID NO: 10169 - protein, 23 aa, Artificial sequence
  synthetic peptide
GTSSLHVYDGKFLARVERVIVVS

SEQ ID NO: 10170 - protein, 23 aa, Artificial sequence
  synthetic peptide
TSSLHVYDGKFLARVERVIVVSM

SEQ ID NO: 10171 - protein, 23 aa, Artificial sequence
  synthetic peptide
SSLHVYDGKFLARVERVIVVSMN

SEQ ID NO: 10172 - protein, 23 aa, Artificial sequence
  synthetic peptide
SLHVYDGKFLARVERVIVVSMNY

SEQ ID NO: 10173 - protein, 23 aa, Artificial sequence
  synthetic peptide
LHVYDGKFLARVERVIVVSMNYR

SEQ ID NO: 10174 - protein, 23 aa, Artificial sequence
  synthetic peptide
HVYDGKFLARVERVIVVSMNYRV

SEQ ID NO: 10175 - protein, 23 aa, Artificial sequence
  synthetic peptide
VYDGKFLARVERVIVVSMNYRVG

SEQ ID NO: 10176 - protein, 23 aa, Artificial sequence
  synthetic peptide
YDGKFLARVERVIVVSMNYRVGA

SEQ ID NO: 10177 - protein, 23 aa, Artificial sequence
  synthetic peptide
DGKFLARVERVIVVSMNYRVGAL

SEQ ID NO: 10178 - protein, 23 aa, Artificial sequence
  synthetic peptide
GKFLARVERVIVVSMNYRVGALG

SEQ ID NO: 10179 - protein, 23 aa, Artificial sequence
  synthetic peptide
KFLARVERVIVVSMNYRVGALGF

SEQ ID NO: 10180 - protein, 23 aa, Artificial sequence
  synthetic peptide
FLARVERVIVVSMNYRVGALGFL

SEQ ID NO: 10181 - protein, 23 aa, Artificial sequence
  synthetic peptide
LARVERVIVVSMNYRVGALGFLA

SEQ ID NO: 10182 - protein, 23 aa, Artificial sequence
  synthetic peptide
ARVERVIVVSMNYRVGALGFLAL

SEQ ID NO: 10183 - protein, 23 aa, Artificial sequence
  synthetic peptide
RVERVIVVSMNYRVGALGFLALP

SEQ ID NO: 10184 - protein, 23 aa, Artificial sequence
  synthetic peptide
VERVIVVSMNYRVGALGFLALPG

SEQ ID NO: 10185 - protein, 23 aa, Artificial sequence
  synthetic peptide
ERVIVVSMNYRVGALGFLALPGN

SEQ ID NO: 10186 - protein, 23 aa, Artificial sequence
  synthetic peptide
RVIVVSMNYRVGALGFLALPGNP

SEQ ID NO: 10187 - protein, 23 aa, Artificial sequence
  synthetic peptide
VIVVSMNYRVGALGFLALPGNPE

SEQ ID NO: 10188 - protein, 23 aa, Artificial sequence
  synthetic peptide
IVVSMNYRVGALGFLALPGNPEA

SEQ ID NO: 10189 - protein, 23 aa, Artificial sequence
  synthetic peptide
VVSMNYRVGALGFLALPGNPEAP

SEQ ID NO: 10190 - protein, 23 aa, Artificial sequence
  synthetic peptide
VSMNYRVGALGFLALPGNPEAPG

SEQ ID NO: 10191 - protein, 23 aa, Artificial sequence
  synthetic peptide
SMNYRVGALGFLALPGNPEAPGN

SEQ ID NO: 10192 - protein, 23 aa, Artificial sequence
  synthetic peptide
MNYRVGALGFLALPGNPEAPGNM

SEQ ID NO: 10193 - protein, 23 aa, Artificial sequence
  synthetic peptide
NYRVGALGFLALPGNPEAPGNMG

SEQ ID NO: 10194 - protein, 23 aa, Artificial sequence
  synthetic peptide
YRVGALGFLALPGNPEAPGNMGL

SEQ ID NO: 10195 - protein, 23 aa, Artificial sequence
  synthetic peptide
RVGALGFLALPGNPEAPGNMGLF

SEQ ID NO: 10196 - protein, 23 aa, Artificial sequence
  synthetic peptide
VGALGFLALPGNPEAPGNMGLFD

SEQ ID NO: 10197 - protein, 23 aa, Artificial sequence
  synthetic peptide
GALGFLALPGNPEAPGNMGLFDQ

SEQ ID NO: 10198 - protein, 23 aa, Artificial sequence
  synthetic peptide
ALGFLALPGNPEAPGNMGLFDQQ

SEQ ID NO: 10199 - protein, 23 aa, Artificial sequence
  synthetic peptide
LGFLALPGNPEAPGNMGLFDQQL

SEQ ID NO: 10200 - protein, 23 aa, Artificial sequence
  synthetic peptide
GFLALPGNPEAPGNMGLFDQQLA

SEQ ID NO: 10201 - protein, 23 aa, Artificial sequence
  synthetic peptide
FLALPGNPEAPGNMGLFDQQLAL

SEQ ID NO: 10202 - protein, 23 aa, Artificial sequence
  synthetic peptide
LALPGNPEAPGNMGLFDQQLALQ

SEQ ID NO: 10203 - protein, 23 aa, Artificial sequence
  synthetic peptide
ALPGNPEAPGNMGLFDQQLALQW

SEQ ID NO: 10204 - protein, 23 aa, Artificial sequence
  synthetic peptide
LPGNPEAPGNMGLFDQQLALQWV

SEQ ID NO: 10205 - protein, 23 aa, Artificial sequence
  synthetic peptide
PGNPEAPGNMGLFDQQLALQWVQ

SEQ ID NO: 10206 - protein, 23 aa, Artificial sequence
  synthetic peptide
GNPEAPGNMGLFDQQLALQWVQK

SEQ ID NO: 10207 - protein, 23 aa, Artificial sequence
  synthetic peptide
NPEAPGNMGLFDQQLALQWVQKN

SEQ ID NO: 10208 - protein, 23 aa, Artificial sequence
  synthetic peptide
PEAPGNMGLFDQQLALQWVQKNI

SEQ ID NO: 10209 - protein, 23 aa, Artificial sequence
  synthetic peptide
EAPGNMGLFDQQLALQWVQKNIA

SEQ ID NO: 10210 - protein, 23 aa, Artificial sequence
  synthetic peptide
APGNMGLFDQQLALQWVQKNIAA

SEQ ID NO: 10211 - protein, 23 aa, Artificial sequence
  synthetic peptide
PGNMGLFDQQLALQWVQKNIAAF

SEQ ID NO: 10212 - protein, 23 aa, Artificial sequence
  synthetic peptide
GNMGLFDQQLALQWVQKNIAAFG

SEQ ID NO: 10213 - protein, 23 aa, Artificial sequence
  synthetic peptide
NMGLFDQQLALQWVQKNIAAFGG

SEQ ID NO: 10214 - protein, 23 aa, Artificial sequence
  synthetic peptide
MGLFDQQLALQWVQKNIAAFGGN

SEQ ID NO: 10215 - protein, 23 aa, Artificial sequence
  synthetic peptide
GLFDQQLALQWVQKNIAAFGGNP

SEQ ID NO: 10216 - protein, 23 aa, Artificial sequence
  synthetic peptide
LFDQQLALQWVQKNIAAFGGNPK

SEQ ID NO: 10217 - protein, 23 aa, Artificial sequence
  synthetic peptide
FDQQLALQWVQKNIAAFGGNPKS

SEQ ID NO: 10218 - protein, 23 aa, Artificial sequence
  synthetic peptide
DQQLALQWVQKNIAAFGGNPKSV

SEQ ID NO: 10219 - protein, 23 aa, Artificial sequence
  synthetic peptide
QQLALQWVQKNIAAFGGNPKSVT

SEQ ID NO: 10220 - protein, 23 aa, Artificial sequence
  synthetic peptide
QLALQWVQKNIAAFGGNPKSVTL

SEQ ID NO: 10221 - protein, 23 aa, Artificial sequence
  synthetic peptide
LALQWVQKNIAAFGGNPKSVTLF

SEQ ID NO: 10222 - protein, 23 aa, Artificial sequence
  synthetic peptide
ALQWVQKNIAAFGGNPKSVTLFG

SEQ ID NO: 10223 - protein, 23 aa, Artificial sequence
  synthetic peptide
LQWVQKNIAAFGGNPKSVTLFGE

SEQ ID NO: 10224 - protein, 23 aa, Artificial sequence
  synthetic peptide
QWVQKNIAAFGGNPKSVTLFGES

SEQ ID NO: 10225 - protein, 23 aa, Artificial sequence
  synthetic peptide
WVQKNIAAFGGNPKSVTLFGESA

SEQ ID NO: 10226 - protein, 23 aa, Artificial sequence
  synthetic peptide
VQKNIAAFGGNPKSVTLFGESAG

SEQ ID NO: 10227 - protein, 23 aa, Artificial sequence
  synthetic peptide
QKNIAAFGGNPKSVTLFGESAGA

SEQ ID NO: 10228 - protein, 23 aa, Artificial sequence
  synthetic peptide
KNIAAFGGNPKSVTLFGESAGAA

SEQ ID NO: 10229 - protein, 23 aa, Artificial sequence
  synthetic peptide
NIAAFGGNPKSVTLFGESAGAAS

SEQ ID NO: 10230 - protein, 23 aa, Artificial sequence
  synthetic peptide
IAAFGGNPKSVTLFGESAGAASV

SEQ ID NO: 10231 - protein, 23 aa, Artificial sequence
  synthetic peptide
AAFGGNPKSVTLFGESAGAASVS

SEQ ID NO: 10232 - protein, 23 aa, Artificial sequence
  synthetic peptide
AFGGNPKSVTLFGESAGAASVSL

SEQ ID NO: 10233 - protein, 23 aa, Artificial sequence
  synthetic peptide
FGGNPKSVTLFGESAGAASVSLH

SEQ ID NO: 10234 - protein, 23 aa, Artificial sequence
  synthetic peptide
GGNPKSVTLFGESAGAASVSLHL

SEQ ID NO: 10235 - protein, 23 aa, Artificial sequence
  synthetic peptide
GNPKSVTLFGESAGAASVSLHLL

SEQ ID NO: 10236 - protein, 23 aa, Artificial sequence
  synthetic peptide
NPKSVTLFGESAGAASVSLHLLS

SEQ ID NO: 10237 - protein, 23 aa, Artificial sequence
  synthetic peptide
PKSVTLFGESAGAASVSLHLLSP

SEQ ID NO: 10238 - protein, 23 aa, Artificial sequence
  synthetic peptide
KSVTLFGESAGAASVSLHLLSPG

SEQ ID NO: 10239 - protein, 23 aa, Artificial sequence
  synthetic peptide
SVTLFGESAGAASVSLHLLSPGS

SEQ ID NO: 10240 - protein, 23 aa, Artificial sequence
  synthetic peptide
VTLFGESAGAASVSLHLLSPGSH

SEQ ID NO: 10241 - protein, 23 aa, Artificial sequence
  synthetic peptide
TLFGESAGAASVSLHLLSPGSHS

SEQ ID NO: 10242 - protein, 23 aa, Artificial sequence
  synthetic peptide
LFGESAGAASVSLHLLSPGSHSL

SEQ ID NO: 10243 - protein, 23 aa, Artificial sequence
  synthetic peptide
FGESAGAASVSLHLLSPGSHSLF

SEQ ID NO: 10244 - protein, 23 aa, Artificial sequence
  synthetic peptide
GESAGAASVSLHLLSPGSHSLFT

SEQ ID NO: 10245 - protein, 23 aa, Artificial sequence
  synthetic peptide
ESAGAASVSLHLLSPGSHSLFTR

SEQ ID NO: 10246 - protein, 23 aa, Artificial sequence
  synthetic peptide
SAGAASVSLHLLSPGSHSLFTRA

SEQ ID NO: 10247 - protein, 23 aa, Artificial sequence
  synthetic peptide
AGAASVSLHLLSPGSHSLFTRAI

SEQ ID NO: 10248 - protein, 23 aa, Artificial sequence
  synthetic peptide
GAASVSLHLLSPGSHSLFTRAIL

SEQ ID NO: 10249 - protein, 23 aa, Artificial sequence
  synthetic peptide
AASVSLHLLSPGSHSLFTRAILQ

SEQ ID NO: 10250 - protein, 23 aa, Artificial sequence
  synthetic peptide
ASVSLHLLSPGSHSLFTRAILQS

SEQ ID NO: 10251 - protein, 23 aa, Artificial sequence
  synthetic peptide
SVSLHLLSPGSHSLFTRAILQSG

SEQ ID NO: 10252 - protein, 23 aa, Artificial sequence
  synthetic peptide
VSLHLLSPGSHSLFTRAILQSGS

SEQ ID NO: 10253 - protein, 23 aa, Artificial sequence
  synthetic peptide
SLHLLSPGSHSLFTRAILQSGSF

SEQ ID NO: 10254 - protein, 23 aa, Artificial sequence
  synthetic peptide
LHLLSPGSHSLFTRAILQSGSFN

SEQ ID NO: 10255 - protein, 23 aa, Artificial sequence
  synthetic peptide
HLLSPGSHSLFTRAILQSGSFNA

SEQ ID NO: 10256 - protein, 23 aa, Artificial sequence
  synthetic peptide
LLSPGSHSLFTRAILQSGSFNAP

SEQ ID NO: 10257 - protein, 23 aa, Artificial sequence
  synthetic peptide
LSPGSHSLFTRAILQSGSFNAPW

SEQ ID NO: 10258 - protein, 23 aa, Artificial sequence
  synthetic peptide
SPGSHSLFTRAILQSGSFNAPWA

SEQ ID NO: 10259 - protein, 23 aa, Artificial sequence
  synthetic peptide
PGSHSLFTRAILQSGSFNAPWAV

SEQ ID NO: 10260 - protein, 23 aa, Artificial sequence
  synthetic peptide
GSHSLFTRAILQSGSFNAPWAVT

SEQ ID NO: 10261 - protein, 23 aa, Artificial sequence
  synthetic peptide
SHSLFTRAILQSGSFNAPWAVTS

SEQ ID NO: 10262 - protein, 23 aa, Artificial sequence
  synthetic peptide
HSLFTRAILQSGSFNAPWAVTSL

SEQ ID NO: 10263 - protein, 23 aa, Artificial sequence
  synthetic peptide
SLFTRAILQSGSFNAPWAVTSLY

SEQ ID NO: 10264 - protein, 23 aa, Artificial sequence
  synthetic peptide
LFTRAILQSGSFNAPWAVTSLYE

SEQ ID NO: 10265 - protein, 23 aa, Artificial sequence
  synthetic peptide
FTRAILQSGSFNAPWAVTSLYEA

SEQ ID NO: 10266 - protein, 23 aa, Artificial sequence
  synthetic peptide
TRAILQSGSFNAPWAVTSLYEAR

SEQ ID NO: 10267 - protein, 23 aa, Artificial sequence
  synthetic peptide
RAILQSGSFNAPWAVTSLYEARN

SEQ ID NO: 10268 - protein, 23 aa, Artificial sequence
  synthetic peptide
AILQSGSFNAPWAVTSLYEARNR

SEQ ID NO: 10269 - protein, 23 aa, Artificial sequence
  synthetic peptide
ILQSGSFNAPWAVTSLYEARNRT

SEQ ID NO: 10270 - protein, 23 aa, Artificial sequence
  synthetic peptide
LQSGSFNAPWAVTSLYEARNRTL

SEQ ID NO: 10271 - protein, 23 aa, Artificial sequence
  synthetic peptide
QSGSFNAPWAVTSLYEARNRTLN

SEQ ID NO: 10272 - protein, 23 aa, Artificial sequence
  synthetic peptide
SGSFNAPWAVTSLYEARNRTLNL

SEQ ID NO: 10273 - protein, 23 aa, Artificial sequence
  synthetic peptide
GSFNAPWAVTSLYEARNRTLNLA

SEQ ID NO: 10274 - protein, 23 aa, Artificial sequence
  synthetic peptide
SFNAPWAVTSLYEARNRTLNLAK

SEQ ID NO: 10275 - protein, 23 aa, Artificial sequence
  synthetic peptide
FNAPWAVTSLYEARNRTLNLAKL

SEQ ID NO: 10276 - protein, 23 aa, Artificial sequence
  synthetic peptide
NAPWAVTSLYEARNRTLNLAKLT

SEQ ID NO: 10277 - protein, 23 aa, Artificial sequence
  synthetic peptide
APWAVTSLYEARNRTLNLAKLTG

SEQ ID NO: 10278 - protein, 23 aa, Artificial sequence
  synthetic peptide
PWAVTSLYEARNRTLNLAKLTGC

SEQ ID NO: 10279 - protein, 23 aa, Artificial sequence
  synthetic peptide
WAVTSLYEARNRTLNLAKLTGCS

SEQ ID NO: 10280 - protein, 23 aa, Artificial sequence
  synthetic peptide
AVTSLYEARNRTLNLAKLTGCSR

SEQ ID NO: 10281 - protein, 23 aa, Artificial sequence
  synthetic peptide
VTSLYEARNRTLNLAKLTGCSRE

SEQ ID NO: 10282 - protein, 23 aa, Artificial sequence
  synthetic peptide
TSLYEARNRTLNLAKLTGCSREN

SEQ ID NO: 10283 - protein, 23 aa, Artificial sequence
  synthetic peptide
SLYEARNRTLNLAKLTGCSRENE

SEQ ID NO: 10284 - protein, 23 aa, Artificial sequence
  synthetic peptide
LYEARNRTLNLAKLTGCSRENET

SEQ ID NO: 10285 - protein, 23 aa, Artificial sequence
  synthetic peptide
YEARNRTLNLAKLTGCSRENETE

SEQ ID NO: 10286 - protein, 23 aa, Artificial sequence
  synthetic peptide
EARNRTLNLAKLTGCSRENETEI

SEQ ID NO: 10287 - protein, 23 aa, Artificial sequence
  synthetic peptide
ARNRTLNLAKLTGCSRENETEII

SEQ ID NO: 10288 - protein, 23 aa, Artificial sequence
  synthetic peptide
RNRTLNLAKLTGCSRENETEIIK

SEQ ID NO: 10289 - protein, 23 aa, Artificial sequence
  synthetic peptide
NRTLNLAKLTGCSRENETEIIKC

SEQ ID NO: 10290 - protein, 23 aa, Artificial sequence
  synthetic peptide
RTLNLAKLTGCSRENETEIIKCL

SEQ ID NO: 10291 - protein, 23 aa, Artificial sequence
  synthetic peptide
TLNLAKLTGCSRENETEIIKCLR

SEQ ID NO: 10292 - protein, 23 aa, Artificial sequence
  synthetic peptide
LNLAKLTGCSRENETEIIKCLRN

SEQ ID NO: 10293 - protein, 23 aa, Artificial sequence
  synthetic peptide
NLAKLTGCSRENETEIIKCLRNK

SEQ ID NO: 10294 - protein, 23 aa, Artificial sequence
  synthetic peptide
LAKLTGCSRENETEIIKCLRNKD

SEQ ID NO: 10295 - protein, 23 aa, Artificial sequence
  synthetic peptide
AKLTGCSRENETEIIKCLRNKDP

SEQ ID NO: 10296 - protein, 23 aa, Artificial sequence
  synthetic peptide
KLTGCSRENETEIIKCLRNKDPQ

SEQ ID NO: 10297 - protein, 23 aa, Artificial sequence
  synthetic peptide
LTGCSRENETEIIKCLRNKDPQE

SEQ ID NO: 10298 - protein, 23 aa, Artificial sequence
  synthetic peptide
TGCSRENETEIIKCLRNKDPQEI

SEQ ID NO: 10299 - protein, 23 aa, Artificial sequence
  synthetic peptide
GCSRENETEIIKCLRNKDPQEIL

SEQ ID NO: 10300 - protein, 23 aa, Artificial sequence
  synthetic peptide
CSRENETEIIKCLRNKDPQEILL

SEQ ID NO: 10301 - protein, 23 aa, Artificial sequence
  synthetic peptide
SRENETEIIKCLRNKDPQEILLN

SEQ ID NO: 10302 - protein, 23 aa, Artificial sequence
  synthetic peptide
RENETEIIKCLRNKDPQEILLNE

SEQ ID NO: 10303 - protein, 23 aa, Artificial sequence
  synthetic peptide
ENETEIIKCLRNKDPQEILLNEA

SEQ ID NO: 10304 - protein, 23 aa, Artificial sequence
  synthetic peptide
NETEIIKCLRNKDPQEILLNEAF

SEQ ID NO: 10305 - protein, 23 aa, Artificial sequence
  synthetic peptide
ETEIIKCLRNKDPQEILLNEAFV

SEQ ID NO: 10306 - protein, 23 aa, Artificial sequence
  synthetic peptide
TEIIKCLRNKDPQEILLNEAFVV

SEQ ID NO: 10307 - protein, 23 aa, Artificial sequence
  synthetic peptide
EIIKCLRNKDPQEILLNEAFVVP

SEQ ID NO: 10308 - protein, 23 aa, Artificial sequence
  synthetic peptide
IIKCLRNKDPQEILLNEAFVVPY

SEQ ID NO: 10309 - protein, 23 aa, Artificial sequence
  synthetic peptide
IKCLRNKDPQEILLNEAFVVPYG

SEQ ID NO: 10310 - protein, 23 aa, Artificial sequence
  synthetic peptide
KCLRNKDPQEILLNEAFVVPYGT

SEQ ID NO: 10311 - protein, 23 aa, Artificial sequence
  synthetic peptide
CLRNKDPQEILLNEAFVVPYGTP

SEQ ID NO: 10312 - protein, 23 aa, Artificial sequence
  synthetic peptide
LRNKDPQEILLNEAFVVPYGTPL

SEQ ID NO: 10313 - protein, 23 aa, Artificial sequence
  synthetic peptide
RNKDPQEILLNEAFVVPYGTPLS

SEQ ID NO: 10314 - protein, 23 aa, Artificial sequence
  synthetic peptide
NKDPQEILLNEAFVVPYGTPLSV

SEQ ID NO: 10315 - protein, 23 aa, Artificial sequence
  synthetic peptide
KDPQEILLNEAFVVPYGTPLSVN

SEQ ID NO: 10316 - protein, 23 aa, Artificial sequence
  synthetic peptide
DPQEILLNEAFVVPYGTPLSVNF

SEQ ID NO: 10317 - protein, 23 aa, Artificial sequence
  synthetic peptide
PQEILLNEAFVVPYGTPLSVNFG

SEQ ID NO: 10318 - protein, 23 aa, Artificial sequence
  synthetic peptide
QEILLNEAFVVPYGTPLSVNFGP

SEQ ID NO: 10319 - protein, 23 aa, Artificial sequence
  synthetic peptide
EILLNEAFVVPYGTPLSVNFGPT

SEQ ID NO: 10320 - protein, 23 aa, Artificial sequence
  synthetic peptide
ILLNEAFVVPYGTPLSVNFGPTV

SEQ ID NO: 10321 - protein, 23 aa, Artificial sequence
  synthetic peptide
LLNEAFVVPYGTPLSVNFGPTVD

SEQ ID NO: 10322 - protein, 23 aa, Artificial sequence
  synthetic peptide
LNEAFVVPYGTPLSVNFGPTVDG

SEQ ID NO: 10323 - protein, 23 aa, Artificial sequence
  synthetic peptide
NEAFVVPYGTPLSVNFGPTVDGD

SEQ ID NO: 10324 - protein, 23 aa, Artificial sequence
  synthetic peptide
EAFVVPYGTPLSVNFGPTVDGDF

SEQ ID NO: 10325 - protein, 23 aa, Artificial sequence
  synthetic peptide
AFVVPYGTPLSVNFGPTVDGDFL

SEQ ID NO: 10326 - protein, 23 aa, Artificial sequence
  synthetic peptide
FVVPYGTPLSVNFGPTVDGDFLT

SEQ ID NO: 10327 - protein, 23 aa, Artificial sequence
  synthetic peptide
VVPYGTPLSVNFGPTVDGDFLTD

SEQ ID NO: 10328 - protein, 23 aa, Artificial sequence
  synthetic peptide
VPYGTPLSVNFGPTVDGDFLTDM

SEQ ID NO: 10329 - protein, 23 aa, Artificial sequence
  synthetic peptide
PYGTPLSVNFGPTVDGDFLTDMP

SEQ ID NO: 10330 - protein, 23 aa, Artificial sequence
  synthetic peptide
YGTPLSVNFGPTVDGDFLTDMPD

SEQ ID NO: 10331 - protein, 23 aa, Artificial sequence
  synthetic peptide
GTPLSVNFGPTVDGDFLTDMPDI

SEQ ID NO: 10332 - protein, 23 aa, Artificial sequence
  synthetic peptide
TPLSVNFGPTVDGDFLTDMPDIL

SEQ ID NO: 10333 - protein, 23 aa, Artificial sequence
  synthetic peptide
PLSVNFGPTVDGDFLTDMPDILL

SEQ ID NO: 10334 - protein, 23 aa, Artificial sequence
  synthetic peptide
LSVNFGPTVDGDFLTDMPDILLE

SEQ ID NO: 10335 - protein, 23 aa, Artificial sequence
  synthetic peptide
SVNFGPTVDGDFLTDMPDILLEL

SEQ ID NO: 10336 - protein, 23 aa, Artificial sequence
  synthetic peptide
VNFGPTVDGDFLTDMPDILLELG

SEQ ID NO: 10337 - protein, 23 aa, Artificial sequence
  synthetic peptide
NFGPTVDGDFLTDMPDILLELGQ

SEQ ID NO: 10338 - protein, 23 aa, Artificial sequence
  synthetic peptide
FGPTVDGDFLTDMPDILLELGQF

SEQ ID NO: 10339 - protein, 23 aa, Artificial sequence
  synthetic peptide
GPTVDGDFLTDMPDILLELGQFK

SEQ ID NO: 10340 - protein, 23 aa, Artificial sequence
  synthetic peptide
PTVDGDFLTDMPDILLELGQFKK

SEQ ID NO: 10341 - protein, 23 aa, Artificial sequence
  synthetic peptide
TVDGDFLTDMPDILLELGQFKKT

SEQ ID NO: 10342 - protein, 23 aa, Artificial sequence
  synthetic peptide
VDGDFLTDMPDILLELGQFKKTQ

SEQ ID NO: 10343 - protein, 23 aa, Artificial sequence
  synthetic peptide
DGDFLTDMPDILLELGQFKKTQI

SEQ ID NO: 10344 - protein, 23 aa, Artificial sequence
  synthetic peptide
GDFLTDMPDILLELGQFKKTQIL

SEQ ID NO: 10345 - protein, 23 aa, Artificial sequence
  synthetic peptide
DFLTDMPDILLELGQFKKTQILV

SEQ ID NO: 10346 - protein, 23 aa, Artificial sequence
  synthetic peptide
FLTDMPDILLELGQFKKTQILVG

SEQ ID NO: 10347 - protein, 23 aa, Artificial sequence
  synthetic peptide
LTDMPDILLELGQFKKTQILVGV

SEQ ID NO: 10348 - protein, 23 aa, Artificial sequence
  synthetic peptide
TDMPDILLELGQFKKTQILVGVN

SEQ ID NO: 10349 - protein, 23 aa, Artificial sequence
  synthetic peptide
DMPDILLELGQFKKTQILVGVNK

SEQ ID NO: 10350 - protein, 23 aa, Artificial sequence
  synthetic peptide
MPDILLELGQFKKTQILVGVNKD

SEQ ID NO: 10351 - protein, 23 aa, Artificial sequence
  synthetic peptide
PDILLELGQFKKTQILVGVNKDE

SEQ ID NO: 10352 - protein, 23 aa, Artificial sequence
  synthetic peptide
DILLELGQFKKTQILVGVNKDEG

SEQ ID NO: 10353 - protein, 23 aa, Artificial sequence
  synthetic peptide
ILLELGQFKKTQILVGVNKDEGT

SEQ ID NO: 10354 - protein, 23 aa, Artificial sequence
  synthetic peptide
LLELGQFKKTQILVGVNKDEGTA

SEQ ID NO: 10355 - protein, 23 aa, Artificial sequence
  synthetic peptide
LELGQFKKTQILVGVNKDEGTAF

SEQ ID NO: 10356 - protein, 23 aa, Artificial sequence
  synthetic peptide
ELGQFKKTQILVGVNKDEGTAFL

SEQ ID NO: 10357 - protein, 23 aa, Artificial sequence
  synthetic peptide
LGQFKKTQILVGVNKDEGTAFLV

SEQ ID NO: 10358 - protein, 23 aa, Artificial sequence
  synthetic peptide
GQFKKTQILVGVNKDEGTAFLVY

SEQ ID NO: 10359 - protein, 23 aa, Artificial sequence
  synthetic peptide
QFKKTQILVGVNKDEGTAFLVYG

SEQ ID NO: 10360 - protein, 23 aa, Artificial sequence
  synthetic peptide
FKKTQILVGVNKDEGTAFLVYGA

SEQ ID NO: 10361 - protein, 23 aa, Artificial sequence
  synthetic peptide
KKTQILVGVNKDEGTAFLVYGAP

SEQ ID NO: 10362 - protein, 23 aa, Artificial sequence
  synthetic peptide
KTQILVGVNKDEGTAFLVYGAPG

SEQ ID NO: 10363 - protein, 23 aa, Artificial sequence
  synthetic peptide
TQILVGVNKDEGTAFLVYGAPGF

SEQ ID NO: 10364 - protein, 23 aa, Artificial sequence
  synthetic peptide
QILVGVNKDEGTAFLVYGAPGFS

SEQ ID NO: 10365 - protein, 23 aa, Artificial sequence
  synthetic peptide
ILVGVNKDEGTAFLVYGAPGFSK

SEQ ID NO: 10366 - protein, 23 aa, Artificial sequence
  synthetic peptide
LVGVNKDEGTAFLVYGAPGFSKD

SEQ ID NO: 10367 - protein, 23 aa, Artificial sequence
  synthetic peptide
VGVNKDEGTAFLVYGAPGFSKDN

SEQ ID NO: 10368 - protein, 23 aa, Artificial sequence
  synthetic peptide
GVNKDEGTAFLVYGAPGFSKDNN

SEQ ID NO: 10369 - protein, 23 aa, Artificial sequence
  synthetic peptide
VNKDEGTAFLVYGAPGFSKDNNS

SEQ ID NO: 10370 - protein, 23 aa, Artificial sequence
  synthetic peptide
NKDEGTAFLVYGAPGFSKDNNSI

SEQ ID NO: 10371 - protein, 23 aa, Artificial sequence
  synthetic peptide
KDEGTAFLVYGAPGFSKDNNSII

SEQ ID NO: 10372 - protein, 23 aa, Artificial sequence
  synthetic peptide
DEGTAFLVYGAPGFSKDNNSIIT

SEQ ID NO: 10373 - protein, 23 aa, Artificial sequence
  synthetic peptide
EGTAFLVYGAPGFSKDNNSIITR

SEQ ID NO: 10374 - protein, 23 aa, Artificial sequence
  synthetic peptide
GTAFLVYGAPGFSKDNNSIITRK

SEQ ID NO: 10375 - protein, 23 aa, Artificial sequence
  synthetic peptide
TAFLVYGAPGFSKDNNSIITRKE

SEQ ID NO: 10376 - protein, 23 aa, Artificial sequence
  synthetic peptide
AFLVYGAPGFSKDNNSIITRKEF

SEQ ID NO: 10377 - protein, 23 aa, Artificial sequence
  synthetic peptide
FLVYGAPGFSKDNNSIITRKEFQ

SEQ ID NO: 10378 - protein, 23 aa, Artificial sequence
  synthetic peptide
LVYGAPGFSKDNNSIITRKEFQE

SEQ ID NO: 10379 - protein, 23 aa, Artificial sequence
  synthetic peptide
VYGAPGFSKDNNSIITRKEFQEG

SEQ ID NO: 10380 - protein, 23 aa, Artificial sequence
  synthetic peptide
YGAPGFSKDNNSIITRKEFQEGL

SEQ ID NO: 10381 - protein, 23 aa, Artificial sequence
  synthetic peptide
GAPGFSKDNNSIITRKEFQEGLK

SEQ ID NO: 10382 - protein, 23 aa, Artificial sequence
  synthetic peptide
APGFSKDNNSIITRKEFQEGLKI

SEQ ID NO: 10383 - protein, 23 aa, Artificial sequence
  synthetic peptide
PGFSKDNNSIITRKEFQEGLKIF

SEQ ID NO: 10384 - protein, 23 aa, Artificial sequence
  synthetic peptide
GFSKDNNSIITRKEFQEGLKIFF

SEQ ID NO: 10385 - protein, 23 aa, Artificial sequence
  synthetic peptide
FSKDNNSIITRKEFQEGLKIFFP

SEQ ID NO: 10386 - protein, 23 aa, Artificial sequence
  synthetic peptide
SKDNNSIITRKEFQEGLKIFFPG

SEQ ID NO: 10387 - protein, 23 aa, Artificial sequence
  synthetic peptide
KDNNSIITRKEFQEGLKIFFPGV

SEQ ID NO: 10388 - protein, 23 aa, Artificial sequence
  synthetic peptide
DNNSIITRKEFQEGLKIFFPGVS

SEQ ID NO: 10389 - protein, 23 aa, Artificial sequence
  synthetic peptide
NNSIITRKEFQEGLKIFFPGVSE

SEQ ID NO: 10390 - protein, 23 aa, Artificial sequence
  synthetic peptide
NSIITRKEFQEGLKIFFPGVSEF

SEQ ID NO: 10391 - protein, 23 aa, Artificial sequence
  synthetic peptide
SIITRKEFQEGLKIFFPGVSEFG

SEQ ID NO: 10392 - protein, 23 aa, Artificial sequence
  synthetic peptide
IITRKEFQEGLKIFFPGVSEFGK

SEQ ID NO: 10393 - protein, 23 aa, Artificial sequence
  synthetic peptide
ITRKEFQEGLKIFFPGVSEFGKE

SEQ ID NO: 10394 - protein, 23 aa, Artificial sequence
  synthetic peptide
TRKEFQEGLKIFFPGVSEFGKES

SEQ ID NO: 10395 - protein, 23 aa, Artificial sequence
  synthetic peptide
RKEFQEGLKIFFPGVSEFGKESI

SEQ ID NO: 10396 - protein, 23 aa, Artificial sequence
  synthetic peptide
KEFQEGLKIFFPGVSEFGKESIL

SEQ ID NO: 10397 - protein, 23 aa, Artificial sequence
  synthetic peptide
EFQEGLKIFFPGVSEFGKESILF

SEQ ID NO: 10398 - protein, 23 aa, Artificial sequence
  synthetic peptide
FQEGLKIFFPGVSEFGKESILFH

SEQ ID NO: 10399 - protein, 23 aa, Artificial sequence
  synthetic peptide
QEGLKIFFPGVSEFGKESILFHY

SEQ ID NO: 10400 - protein, 23 aa, Artificial sequence
  synthetic peptide
EGLKIFFPGVSEFGKESILFHYT

SEQ ID NO: 10401 - protein, 23 aa, Artificial sequence
  synthetic peptide
GLKIFFPGVSEFGKESILFHYTD

SEQ ID NO: 10402 - protein, 23 aa, Artificial sequence
  synthetic peptide
LKIFFPGVSEFGKESILFHYTDW

SEQ ID NO: 10403 - protein, 23 aa, Artificial sequence
  synthetic peptide
KIFFPGVSEFGKESILFHYTDWV

SEQ ID NO: 10404 - protein, 23 aa, Artificial sequence
  synthetic peptide
IFFPGVSEFGKESILFHYTDWVD

SEQ ID NO: 10405 - protein, 23 aa, Artificial sequence
  synthetic peptide
FFPGVSEFGKESILFHYTDWVDD

SEQ ID NO: 10406 - protein, 23 aa, Artificial sequence
  synthetic peptide
FPGVSEFGKESILFHYTDWVDDQ

SEQ ID NO: 10407 - protein, 23 aa, Artificial sequence
  synthetic peptide
PGVSEFGKESILFHYTDWVDDQR

SEQ ID NO: 10408 - protein, 23 aa, Artificial sequence
  synthetic peptide
GVSEFGKESILFHYTDWVDDQRP

SEQ ID NO: 10409 - protein, 23 aa, Artificial sequence
  synthetic peptide
VSEFGKESILFHYTDWVDDQRPE

SEQ ID NO: 10410 - protein, 23 aa, Artificial sequence
  synthetic peptide
SEFGKESILFHYTDWVDDQRPEN

SEQ ID NO: 10411 - protein, 23 aa, Artificial sequence
  synthetic peptide
EFGKESILFHYTDWVDDQRPENY

SEQ ID NO: 10412 - protein, 23 aa, Artificial sequence
  synthetic peptide
FGKESILFHYTDWVDDQRPENYR

SEQ ID NO: 10413 - protein, 23 aa, Artificial sequence
  synthetic peptide
GKESILFHYTDWVDDQRPENYRE

SEQ ID NO: 10414 - protein, 23 aa, Artificial sequence
  synthetic peptide
KESILFHYTDWVDDQRPENYREA

SEQ ID NO: 10415 - protein, 23 aa, Artificial sequence
  synthetic peptide
ESILFHYTDWVDDQRPENYREAL

SEQ ID NO: 10416 - protein, 23 aa, Artificial sequence
  synthetic peptide
SILFHYTDWVDDQRPENYREALG

SEQ ID NO: 10417 - protein, 23 aa, Artificial sequence
  synthetic peptide
ILFHYTDWVDDQRPENYREALGD

SEQ ID NO: 10418 - protein, 23 aa, Artificial sequence
  synthetic peptide
LFHYTDWVDDQRPENYREALGDV

SEQ ID NO: 10419 - protein, 23 aa, Artificial sequence
  synthetic peptide
FHYTDWVDDQRPENYREALGDVV

SEQ ID NO: 10420 - protein, 23 aa, Artificial sequence
  synthetic peptide
HYTDWVDDQRPENYREALGDVVG

SEQ ID NO: 10421 - protein, 23 aa, Artificial sequence
  synthetic peptide
YTDWVDDQRPENYREALGDVVGD

SEQ ID NO: 10422 - protein, 23 aa, Artificial sequence
  synthetic peptide
TDWVDDQRPENYREALGDVVGDY

SEQ ID NO: 10423 - protein, 23 aa, Artificial sequence
  synthetic peptide
DWVDDQRPENYREALGDVVGDYN

SEQ ID NO: 10424 - protein, 23 aa, Artificial sequence
  synthetic peptide
WVDDQRPENYREALGDVVGDYNF

SEQ ID NO: 10425 - protein, 23 aa, Artificial sequence
  synthetic peptide
VDDQRPENYREALGDVVGDYNFI

SEQ ID NO: 10426 - protein, 23 aa, Artificial sequence
  synthetic peptide
DDQRPENYREALGDVVGDYNFIC

SEQ ID NO: 10427 - protein, 23 aa, Artificial sequence
  synthetic peptide
DQRPENYREALGDVVGDYNFICP

SEQ ID NO: 10428 - protein, 23 aa, Artificial sequence
  synthetic peptide
QRPENYREALGDVVGDYNFICPA

SEQ ID NO: 10429 - protein, 23 aa, Artificial sequence
  synthetic peptide
RPENYREALGDVVGDYNFICPAL

SEQ ID NO: 10430 - protein, 23 aa, Artificial sequence
  synthetic peptide
PENYREALGDVVGDYNFICPALE

SEQ ID NO: 10431 - protein, 23 aa, Artificial sequence
  synthetic peptide
ENYREALGDVVGDYNFICPALEF

SEQ ID NO: 10432 - protein, 23 aa, Artificial sequence
  synthetic peptide
NYREALGDVVGDYNFICPALEFT

SEQ ID NO: 10433 - protein, 23 aa, Artificial sequence
  synthetic peptide
YREALGDVVGDYNFICPALEFTK

SEQ ID NO: 10434 - protein, 23 aa, Artificial sequence
  synthetic peptide
REALGDVVGDYNFICPALEFTKK

SEQ ID NO: 10435 - protein, 23 aa, Artificial sequence
  synthetic peptide
EALGDVVGDYNFICPALEFTKKF

SEQ ID NO: 10436 - protein, 23 aa, Artificial sequence
  synthetic peptide
ALGDVVGDYNFICPALEFTKKFS

SEQ ID NO: 10437 - protein, 23 aa, Artificial sequence
  synthetic peptide
LGDVVGDYNFICPALEFTKKFSE

SEQ ID NO: 10438 - protein, 23 aa, Artificial sequence
  synthetic peptide
GDVVGDYNFICPALEFTKKFSEW

SEQ ID NO: 10439 - protein, 23 aa, Artificial sequence
  synthetic peptide
DVVGDYNFICPALEFTKKFSEWG

SEQ ID NO: 10440 - protein, 23 aa, Artificial sequence
  synthetic peptide
VVGDYNFICPALEFTKKFSEWGN

SEQ ID NO: 10441 - protein, 23 aa, Artificial sequence
  synthetic peptide
VGDYNFICPALEFTKKFSEWGNN

SEQ ID NO: 10442 - protein, 23 aa, Artificial sequence
  synthetic peptide
GDYNFICPALEFTKKFSEWGNNA

SEQ ID NO: 10443 - protein, 23 aa, Artificial sequence
  synthetic peptide
DYNFICPALEFTKKFSEWGNNAF

SEQ ID NO: 10444 - protein, 23 aa, Artificial sequence
  synthetic peptide
YNFICPALEFTKKFSEWGNNAFF

SEQ ID NO: 10445 - protein, 23 aa, Artificial sequence
  synthetic peptide
NFICPALEFTKKFSEWGNNAFFY

SEQ ID NO: 10446 - protein, 23 aa, Artificial sequence
  synthetic peptide
FICPALEFTKKFSEWGNNAFFYY

SEQ ID NO: 10447 - protein, 23 aa, Artificial sequence
  synthetic peptide
ICPALEFTKKFSEWGNNAFFYYF

SEQ ID NO: 10448 - protein, 23 aa, Artificial sequence
  synthetic peptide
CPALEFTKKFSEWGNNAFFYYFE

SEQ ID NO: 10449 - protein, 23 aa, Artificial sequence
  synthetic peptide
PALEFTKKFSEWGNNAFFYYFEH

SEQ ID NO: 10450 - protein, 23 aa, Artificial sequence
  synthetic peptide
ALEFTKKFSEWGNNAFFYYFEHR

SEQ ID NO: 10451 - protein, 23 aa, Artificial sequence
  synthetic peptide
LEFTKKFSEWGNNAFFYYFEHRS

SEQ ID NO: 10452 - protein, 23 aa, Artificial sequence
  synthetic peptide
EFTKKFSEWGNNAFFYYFEHRSS

SEQ ID NO: 10453 - protein, 23 aa, Artificial sequence
  synthetic peptide
FTKKFSEWGNNAFFYYFEHRSSK

SEQ ID NO: 10454 - protein, 23 aa, Artificial sequence
  synthetic peptide
TKKFSEWGNNAFFYYFEHRSSKL

SEQ ID NO: 10455 - protein, 23 aa, Artificial sequence
  synthetic peptide
KKFSEWGNNAFFYYFEHRSSKLP

SEQ ID NO: 10456 - protein, 23 aa, Artificial sequence
  synthetic peptide
KFSEWGNNAFFYYFEHRSSKLPW

SEQ ID NO: 10457 - protein, 23 aa, Artificial sequence
  synthetic peptide
FSEWGNNAFFYYFEHRSSKLPWP

SEQ ID NO: 10458 - protein, 23 aa, Artificial sequence
  synthetic peptide
SEWGNNAFFYYFEHRSSKLPWPE

SEQ ID NO: 10459 - protein, 23 aa, Artificial sequence
  synthetic peptide
EWGNNAFFYYFEHRSSKLPWPEW

SEQ ID NO: 10460 - protein, 23 aa, Artificial sequence
  synthetic peptide
WGNNAFFYYFEHRSSKLPWPEWM

SEQ ID NO: 10461 - protein, 23 aa, Artificial sequence
  synthetic peptide
GNNAFFYYFEHRSSKLPWPEWMG

SEQ ID NO: 10462 - protein, 23 aa, Artificial sequence
  synthetic peptide
NNAFFYYFEHRSSKLPWPEWMGV

SEQ ID NO: 10463 - protein, 23 aa, Artificial sequence
  synthetic peptide
NAFFYYFEHRSSKLPWPEWMGVM

SEQ ID NO: 10464 - protein, 23 aa, Artificial sequence
  synthetic peptide
AFFYYFEHRSSKLPWPEWMGVMH

SEQ ID NO: 10465 - protein, 23 aa, Artificial sequence
  synthetic peptide
FFYYFEHRSSKLPWPEWMGVMHG

SEQ ID NO: 10466 - protein, 23 aa, Artificial sequence
  synthetic peptide
FYYFEHRSSKLPWPEWMGVMHGY

SEQ ID NO: 10467 - protein, 23 aa, Artificial sequence
  synthetic peptide
YYFEHRSSKLPWPEWMGVMHGYE

SEQ ID NO: 10468 - protein, 23 aa, Artificial sequence
  synthetic peptide
YFEHRSSKLPWPEWMGVMHGYEI

SEQ ID NO: 10469 - protein, 23 aa, Artificial sequence
  synthetic peptide
FEHRSSKLPWPEWMGVMHGYEIE

SEQ ID NO: 10470 - protein, 23 aa, Artificial sequence
  synthetic peptide
EHRSSKLPWPEWMGVMHGYEIEF

SEQ ID NO: 10471 - protein, 23 aa, Artificial sequence
  synthetic peptide
HRSSKLPWPEWMGVMHGYEIEFV

SEQ ID NO: 10472 - protein, 23 aa, Artificial sequence
  synthetic peptide
RSSKLPWPEWMGVMHGYEIEFVF

SEQ ID NO: 10473 - protein, 23 aa, Artificial sequence
  synthetic peptide
SSKLPWPEWMGVMHGYEIEFVFG

SEQ ID NO: 10474 - protein, 23 aa, Artificial sequence
  synthetic peptide
SKLPWPEWMGVMHGYEIEFVFGL

SEQ ID NO: 10475 - protein, 23 aa, Artificial sequence
  synthetic peptide
KLPWPEWMGVMHGYEIEFVFGLP

SEQ ID NO: 10476 - protein, 23 aa, Artificial sequence
  synthetic peptide
LPWPEWMGVMHGYEIEFVFGLPL

SEQ ID NO: 10477 - protein, 23 aa, Artificial sequence
  synthetic peptide
PWPEWMGVMHGYEIEFVFGLPLE

SEQ ID NO: 10478 - protein, 23 aa, Artificial sequence
  synthetic peptide
WPEWMGVMHGYEIEFVFGLPLER

SEQ ID NO: 10479 - protein, 23 aa, Artificial sequence
  synthetic peptide
PEWMGVMHGYEIEFVFGLPLERR

SEQ ID NO: 10480 - protein, 23 aa, Artificial sequence
  synthetic peptide
EWMGVMHGYEIEFVFGLPLERRD

SEQ ID NO: 10481 - protein, 23 aa, Artificial sequence
  synthetic peptide
WMGVMHGYEIEFVFGLPLERRDN

SEQ ID NO: 10482 - protein, 23 aa, Artificial sequence
  synthetic peptide
MGVMHGYEIEFVFGLPLERRDNY

SEQ ID NO: 10483 - protein, 23 aa, Artificial sequence
  synthetic peptide
GVMHGYEIEFVFGLPLERRDNYT

SEQ ID NO: 10484 - protein, 23 aa, Artificial sequence
  synthetic peptide
VMHGYEIEFVFGLPLERRDNYTK

SEQ ID NO: 10485 - protein, 23 aa, Artificial sequence
  synthetic peptide
MHGYEIEFVFGLPLERRDNYTKA

SEQ ID NO: 10486 - protein, 23 aa, Artificial sequence
  synthetic peptide
HGYEIEFVFGLPLERRDNYTKAE

SEQ ID NO: 10487 - protein, 23 aa, Artificial sequence
  synthetic peptide
GYEIEFVFGLPLERRDNYTKAEE

SEQ ID NO: 10488 - protein, 23 aa, Artificial sequence
  synthetic peptide
YEIEFVFGLPLERRDNYTKAEEI

SEQ ID NO: 10489 - protein, 23 aa, Artificial sequence
  synthetic peptide
EIEFVFGLPLERRDNYTKAEEIL

SEQ ID NO: 10490 - protein, 23 aa, Artificial sequence
  synthetic peptide
IEFVFGLPLERRDNYTKAEEILS

SEQ ID NO: 10491 - protein, 23 aa, Artificial sequence
  synthetic peptide
EFVFGLPLERRDNYTKAEEILSR

SEQ ID NO: 10492 - protein, 23 aa, Artificial sequence
  synthetic peptide
FVFGLPLERRDNYTKAEEILSRS

SEQ ID NO: 10493 - protein, 23 aa, Artificial sequence
  synthetic peptide
VFGLPLERRDNYTKAEEILSRSI

SEQ ID NO: 10494 - protein, 23 aa, Artificial sequence
  synthetic peptide
FGLPLERRDNYTKAEEILSRSIV

SEQ ID NO: 10495 - protein, 23 aa, Artificial sequence
  synthetic peptide
GLPLERRDNYTKAEEILSRSIVK

SEQ ID NO: 10496 - protein, 23 aa, Artificial sequence
  synthetic peptide
LPLERRDNYTKAEEILSRSIVKR

SEQ ID NO: 10497 - protein, 23 aa, Artificial sequence
  synthetic peptide
PLERRDNYTKAEEILSRSIVKRW

SEQ ID NO: 10498 - protein, 23 aa, Artificial sequence
  synthetic peptide
LERRDNYTKAEEILSRSIVKRWA

SEQ ID NO: 10499 - protein, 23 aa, Artificial sequence
  synthetic peptide
ERRDNYTKAEEILSRSIVKRWAN

SEQ ID NO: 10500 - protein, 23 aa, Artificial sequence
  synthetic peptide
RRDNYTKAEEILSRSIVKRWANF

SEQ ID NO: 10501 - protein, 23 aa, Artificial sequence
  synthetic peptide
RDNYTKAEEILSRSIVKRWANFA

SEQ ID NO: 10502 - protein, 23 aa, Artificial sequence
  synthetic peptide
DNYTKAEEILSRSIVKRWANFAK

SEQ ID NO: 10503 - protein, 23 aa, Artificial sequence
  synthetic peptide
NYTKAEEILSRSIVKRWANFAKY

SEQ ID NO: 10504 - protein, 23 aa, Artificial sequence
  synthetic peptide
YTKAEEILSRSIVKRWANFAKYG

SEQ ID NO: 10505 - protein, 23 aa, Artificial sequence
  synthetic peptide
TKAEEILSRSIVKRWANFAKYGN

SEQ ID NO: 10506 - protein, 23 aa, Artificial sequence
  synthetic peptide
KAEEILSRSIVKRWANFAKYGNP

SEQ ID NO: 10507 - protein, 23 aa, Artificial sequence
  synthetic peptide
AEEILSRSIVKRWANFAKYGNPN

SEQ ID NO: 10508 - protein, 23 aa, Artificial sequence
  synthetic peptide
EEILSRSIVKRWANFAKYGNPNE

SEQ ID NO: 10509 - protein, 23 aa, Artificial sequence
  synthetic peptide
EILSRSIVKRWANFAKYGNPNET

SEQ ID NO: 10510 - protein, 23 aa, Artificial sequence
  synthetic peptide
ILSRSIVKRWANFAKYGNPNETQ

SEQ ID NO: 10511 - protein, 23 aa, Artificial sequence
  synthetic peptide
LSRSIVKRWANFAKYGNPNETQN

SEQ ID NO: 10512 - protein, 23 aa, Artificial sequence
  synthetic peptide
SRSIVKRWANFAKYGNPNETQNN

SEQ ID NO: 10513 - protein, 23 aa, Artificial sequence
  synthetic peptide
RSIVKRWANFAKYGNPNETQNNS

SEQ ID NO: 10514 - protein, 23 aa, Artificial sequence
  synthetic peptide
SIVKRWANFAKYGNPNETQNNST

SEQ ID NO: 10515 - protein, 23 aa, Artificial sequence
  synthetic peptide
IVKRWANFAKYGNPNETQNNSTS

SEQ ID NO: 10516 - protein, 23 aa, Artificial sequence
  synthetic peptide
VKRWANFAKYGNPNETQNNSTSW

SEQ ID NO: 10517 - protein, 23 aa, Artificial sequence
  synthetic peptide
KRWANFAKYGNPNETQNNSTSWP

SEQ ID NO: 10518 - protein, 23 aa, Artificial sequence
  synthetic peptide
RWANFAKYGNPNETQNNSTSWPV

SEQ ID NO: 10519 - protein, 23 aa, Artificial sequence
  synthetic peptide
WANFAKYGNPNETQNNSTSWPVF

SEQ ID NO: 10520 - protein, 23 aa, Artificial sequence
  synthetic peptide
ANFAKYGNPNETQNNSTSWPVFK

SEQ ID NO: 10521 - protein, 23 aa, Artificial sequence
  synthetic peptide
NFAKYGNPNETQNNSTSWPVFKS

SEQ ID NO: 10522 - protein, 23 aa, Artificial sequence
  synthetic peptide
FAKYGNPNETQNNSTSWPVFKST

SEQ ID NO: 10523 - protein, 23 aa, Artificial sequence
  synthetic peptide
AKYGNPNETQNNSTSWPVFKSTE

SEQ ID NO: 10524 - protein, 23 aa, Artificial sequence
  synthetic peptide
KYGNPNETQNNSTSWPVFKSTEQ

SEQ ID NO: 10525 - protein, 23 aa, Artificial sequence
  synthetic peptide
YGNPNETQNNSTSWPVFKSTEQK

SEQ ID NO: 10526 - protein, 23 aa, Artificial sequence
  synthetic peptide
GNPNETQNNSTSWPVFKSTEQKY

SEQ ID NO: 10527 - protein, 23 aa, Artificial sequence
  synthetic peptide
NPNETQNNSTSWPVFKSTEQKYL

SEQ ID NO: 10528 - protein, 23 aa, Artificial sequence
  synthetic peptide
PNETQNNSTSWPVFKSTEQKYLT

SEQ ID NO: 10529 - protein, 23 aa, Artificial sequence
  synthetic peptide
NETQNNSTSWPVFKSTEQKYLTL

SEQ ID NO: 10530 - protein, 23 aa, Artificial sequence
  synthetic peptide
ETQNNSTSWPVFKSTEQKYLTLN

SEQ ID NO: 10531 - protein, 23 aa, Artificial sequence
  synthetic peptide
TQNNSTSWPVFKSTEQKYLTLNT

SEQ ID NO: 10532 - protein, 23 aa, Artificial sequence
  synthetic peptide
QNNSTSWPVFKSTEQKYLTLNTE

SEQ ID NO: 10533 - protein, 23 aa, Artificial sequence
  synthetic peptide
NNSTSWPVFKSTEQKYLTLNTES

SEQ ID NO: 10534 - protein, 23 aa, Artificial sequence
  synthetic peptide
NSTSWPVFKSTEQKYLTLNTEST

SEQ ID NO: 10535 - protein, 23 aa, Artificial sequence
  synthetic peptide
STSWPVFKSTEQKYLTLNTESTR

SEQ ID NO: 10536 - protein, 23 aa, Artificial sequence
  synthetic peptide
TSWPVFKSTEQKYLTLNTESTRI

SEQ ID NO: 10537 - protein, 23 aa, Artificial sequence
  synthetic peptide
SWPVFKSTEQKYLTLNTESTRIM

SEQ ID NO: 10538 - protein, 23 aa, Artificial sequence
  synthetic peptide
WPVFKSTEQKYLTLNTESTRIMT

SEQ ID NO: 10539 - protein, 23 aa, Artificial sequence
  synthetic peptide
PVFKSTEQKYLTLNTESTRIMTK

SEQ ID NO: 10540 - protein, 23 aa, Artificial sequence
  synthetic peptide
VFKSTEQKYLTLNTESTRIMTKL

SEQ ID NO: 10541 - protein, 23 aa, Artificial sequence
  synthetic peptide
FKSTEQKYLTLNTESTRIMTKLR

SEQ ID NO: 10542 - protein, 23 aa, Artificial sequence
  synthetic peptide
KSTEQKYLTLNTESTRIMTKLRA

SEQ ID NO: 10543 - protein, 23 aa, Artificial sequence
  synthetic peptide
STEQKYLTLNTESTRIMTKLRAQ

SEQ ID NO: 10544 - protein, 23 aa, Artificial sequence
  synthetic peptide
TEQKYLTLNTESTRIMTKLRAQQ

SEQ ID NO: 10545 - protein, 23 aa, Artificial sequence
  synthetic peptide
EQKYLTLNTESTRIMTKLRAQQC

SEQ ID NO: 10546 - protein, 23 aa, Artificial sequence
  synthetic peptide
QKYLTLNTESTRIMTKLRAQQCR

SEQ ID NO: 10547 - protein, 23 aa, Artificial sequence
  synthetic peptide
KYLTLNTESTRIMTKLRAQQCRF

SEQ ID NO: 10548 - protein, 23 aa, Artificial sequence
  synthetic peptide
YLTLNTESTRIMTKLRAQQCRFW

SEQ ID NO: 10549 - protein, 23 aa, Artificial sequence
  synthetic peptide
LTLNTESTRIMTKLRAQQCRFWT

SEQ ID NO: 10550 - protein, 23 aa, Artificial sequence
  synthetic peptide
TLNTESTRIMTKLRAQQCRFWTS

SEQ ID NO: 10551 - protein, 23 aa, Artificial sequence
  synthetic peptide
LNTESTRIMTKLRAQQCRFWTSF

SEQ ID NO: 10552 - protein, 23 aa, Artificial sequence
  synthetic peptide
NTESTRIMTKLRAQQCRFWTSFF

SEQ ID NO: 10553 - protein, 23 aa, Artificial sequence
  synthetic peptide
TESTRIMTKLRAQQCRFWTSFFP

SEQ ID NO: 10554 - protein, 23 aa, Artificial sequence
  synthetic peptide
ESTRIMTKLRAQQCRFWTSFFPK

SEQ ID NO: 10555 - protein, 23 aa, Artificial sequence
  synthetic peptide
STRIMTKLRAQQCRFWTSFFPKV

SEQ ID NO: 10556 - protein, 23 aa, Artificial sequence
  synthetic peptide
TRIMTKLRAQQCRFWTSFFPKVL

SEQ ID NO: 10557 - protein, 23 aa, Artificial sequence
  synthetic peptide
RIMTKLRAQQCRFWTSFFPKVLE

SEQ ID NO: 10558 - protein, 23 aa, Artificial sequence
  synthetic peptide
IMTKLRAQQCRFWTSFFPKVLEM

SEQ ID NO: 10559 - protein, 23 aa, Artificial sequence
  synthetic peptide
MTKLRAQQCRFWTSFFPKVLEMT

SEQ ID NO: 10560 - protein, 23 aa, Artificial sequence
  synthetic peptide
TKLRAQQCRFWTSFFPKVLEMTG

SEQ ID NO: 10561 - protein, 23 aa, Artificial sequence
  synthetic peptide
KLRAQQCRFWTSFFPKVLEMTGN

SEQ ID NO: 10562 - protein, 23 aa, Artificial sequence
  synthetic peptide
LRAQQCRFWTSFFPKVLEMTGNI

SEQ ID NO: 10563 - protein, 23 aa, Artificial sequence
  synthetic peptide
RAQQCRFWTSFFPKVLEMTGNID

SEQ ID NO: 10564 - protein, 23 aa, Artificial sequence
  synthetic peptide
AQQCRFWTSFFPKVLEMTGNIDE

SEQ ID NO: 10565 - protein, 23 aa, Artificial sequence
  synthetic peptide
QQCRFWTSFFPKVLEMTGNIDEA

SEQ ID NO: 10566 - protein, 23 aa, Artificial sequence
  synthetic peptide
QCRFWTSFFPKVLEMTGNIDEAE

SEQ ID NO: 10567 - protein, 23 aa, Artificial sequence
  synthetic peptide
CRFWTSFFPKVLEMTGNIDEAEW

SEQ ID NO: 10568 - protein, 23 aa, Artificial sequence
  synthetic peptide
RFWTSFFPKVLEMTGNIDEAEWE

SEQ ID NO: 10569 - protein, 23 aa, Artificial sequence
  synthetic peptide
FWTSFFPKVLEMTGNIDEAEWEW

SEQ ID NO: 10570 - protein, 23 aa, Artificial sequence
  synthetic peptide
WTSFFPKVLEMTGNIDEAEWEWK

SEQ ID NO: 10571 - protein, 23 aa, Artificial sequence
  synthetic peptide
TSFFPKVLEMTGNIDEAEWEWKA

SEQ ID NO: 10572 - protein, 23 aa, Artificial sequence
  synthetic peptide
SFFPKVLEMTGNIDEAEWEWKAG

SEQ ID NO: 10573 - protein, 23 aa, Artificial sequence
  synthetic peptide
FFPKVLEMTGNIDEAEWEWKAGF

SEQ ID NO: 10574 - protein, 23 aa, Artificial sequence
  synthetic peptide
FPKVLEMTGNIDEAEWEWKAGFH

SEQ ID NO: 10575 - protein, 23 aa, Artificial sequence
  synthetic peptide
PKVLEMTGNIDEAEWEWKAGFHR

SEQ ID NO: 10576 - protein, 23 aa, Artificial sequence
  synthetic peptide
KVLEMTGNIDEAEWEWKAGFHRW

SEQ ID NO: 10577 - protein, 23 aa, Artificial sequence
  synthetic peptide
VLEMTGNIDEAEWEWKAGFHRWN

SEQ ID NO: 10578 - protein, 23 aa, Artificial sequence
  synthetic peptide
LEMTGNIDEAEWEWKAGFHRWNN

SEQ ID NO: 10579 - protein, 23 aa, Artificial sequence
  synthetic peptide
EMTGNIDEAEWEWKAGFHRWNNY

SEQ ID NO: 10580 - protein, 23 aa, Artificial sequence
  synthetic peptide
MTGNIDEAEWEWKAGFHRWNNYM

SEQ ID NO: 10581 - protein, 23 aa, Artificial sequence
  synthetic peptide
TGNIDEAEWEWKAGFHRWNNYMM

SEQ ID NO: 10582 - protein, 23 aa, Artificial sequence
  synthetic peptide
GNIDEAEWEWKAGFHRWNNYMMD

SEQ ID NO: 10583 - protein, 23 aa, Artificial sequence
  synthetic peptide
NIDEAEWEWKAGFHRWNNYMMDW

SEQ ID NO: 10584 - protein, 23 aa, Artificial sequence
  synthetic peptide
IDEAEWEWKAGFHRWNNYMMDWK

SEQ ID NO: 10585 - protein, 23 aa, Artificial sequence
  synthetic peptide
DEAEWEWKAGFHRWNNYMMDWKN

SEQ ID NO: 10586 - protein, 23 aa, Artificial sequence
  synthetic peptide
EAEWEWKAGFHRWNNYMMDWKNQ

SEQ ID NO: 10587 - protein, 23 aa, Artificial sequence
  synthetic peptide
AEWEWKAGFHRWNNYMMDWKNQF

SEQ ID NO: 10588 - protein, 23 aa, Artificial sequence
  synthetic peptide
EWEWKAGFHRWNNYMMDWKNQFN

SEQ ID NO: 10589 - protein, 23 aa, Artificial sequence
  synthetic peptide
WEWKAGFHRWNNYMMDWKNQFND

SEQ ID NO: 10590 - protein, 23 aa, Artificial sequence
  synthetic peptide
EWKAGFHRWNNYMMDWKNQFNDY

SEQ ID NO: 10591 - protein, 23 aa, Artificial sequence
  synthetic peptide
WKAGFHRWNNYMMDWKNQFNDYT

SEQ ID NO: 10592 - protein, 23 aa, Artificial sequence
  synthetic peptide
KAGFHRWNNYMMDWKNQFNDYTS

SEQ ID NO: 10593 - protein, 23 aa, Artificial sequence
  synthetic peptide
AGFHRWNNYMMDWKNQFNDYTSK

SEQ ID NO: 10594 - protein, 23 aa, Artificial sequence
  synthetic peptide
GFHRWNNYMMDWKNQFNDYTSKK

SEQ ID NO: 10595 - protein, 23 aa, Artificial sequence
  synthetic peptide
FHRWNNYMMDWKNQFNDYTSKKE

SEQ ID NO: 10596 - protein, 23 aa, Artificial sequence
  synthetic peptide
HRWNNYMMDWKNQFNDYTSKKES

SEQ ID NO: 10597 - protein, 23 aa, Artificial sequence
  synthetic peptide
RWNNYMMDWKNQFNDYTSKKESC

SEQ ID NO: 10598 - protein, 23 aa, Artificial sequence
  synthetic peptide
WNNYMMDWKNQFNDYTSKKESCV

SEQ ID NO: 10599 - protein, 23 aa, Artificial sequence
  synthetic peptide
NNYMMDWKNQFNDYTSKKESCVG

SEQ ID NO: 10600 - protein, 23 aa, Artificial sequence
  synthetic peptide
NYMMDWKNQFNDYTSKKESCVGL

SEQ ID NO: 10601 - protein, 24 aa, Artificial sequence
  synthetic peptide
MHSKVTIICIRFLFWFLLLCMLIG

SEQ ID NO: 10602 - protein, 24 aa, Artificial sequence
  synthetic peptide
HSKVTIICIRFLFWFLLLCMLIGK

SEQ ID NO: 10603 - protein, 24 aa, Artificial sequence
  synthetic peptide
SKVTIICIRFLFWFLLLCMLIGKS

SEQ ID NO: 10604 - protein, 24 aa, Artificial sequence
  synthetic peptide
KVTIICIRFLFWFLLLCMLIGKSH

SEQ ID NO: 10605 - protein, 24 aa, Artificial sequence
  synthetic peptide
VTIICIRFLFWFLLLCMLIGKSHT

SEQ ID NO: 10606 - protein, 24 aa, Artificial sequence
  synthetic peptide
TIICIRFLFWFLLLCMLIGKSHTE

SEQ ID NO: 10607 - protein, 24 aa, Artificial sequence
  synthetic peptide
IICIRFLFWFLLLCMLIGKSHTED

SEQ ID NO: 10608 - protein, 24 aa, Artificial sequence
  synthetic peptide
ICIRFLFWFLLLCMLIGKSHTEDD

SEQ ID NO: 10609 - protein, 24 aa, Artificial sequence
  synthetic peptide
CIRFLFWFLLLCMLIGKSHTEDDI

SEQ ID NO: 10610 - protein, 24 aa, Artificial sequence
  synthetic peptide
IRFLFWFLLLCMLIGKSHTEDDII

SEQ ID NO: 10611 - protein, 24 aa, Artificial sequence
  synthetic peptide
RFLFWFLLLCMLIGKSHTEDDIII

SEQ ID NO: 10612 - protein, 24 aa, Artificial sequence
  synthetic peptide
FLFWFLLLCMLIGKSHTEDDIIIA

SEQ ID NO: 10613 - protein, 24 aa, Artificial sequence
  synthetic peptide
LFWFLLLCMLIGKSHTEDDIIIAT

SEQ ID NO: 10614 - protein, 24 aa, Artificial sequence
  synthetic peptide
FWFLLLCMLIGKSHTEDDIIIATK

SEQ ID NO: 10615 - protein, 24 aa, Artificial sequence
  synthetic peptide
WFLLLCMLIGKSHTEDDIIIATKN

SEQ ID NO: 10616 - protein, 24 aa, Artificial sequence
  synthetic peptide
FLLLCMLIGKSHTEDDIIIATKNG

SEQ ID NO: 10617 - protein, 24 aa, Artificial sequence
  synthetic peptide
LLLCMLIGKSHTEDDIIIATKNGK

SEQ ID NO: 10618 - protein, 24 aa, Artificial sequence
  synthetic peptide
LLCMLIGKSHTEDDIIIATKNGKV

SEQ ID NO: 10619 - protein, 24 aa, Artificial sequence
  synthetic peptide
LCMLIGKSHTEDDIIIATKNGKVR

SEQ ID NO: 10620 - protein, 24 aa, Artificial sequence
  synthetic peptide
CMLIGKSHTEDDIIIATKNGKVRG

SEQ ID NO: 10621 - protein, 24 aa, Artificial sequence
  synthetic peptide
MLIGKSHTEDDIIIATKNGKVRGM

SEQ ID NO: 10622 - protein, 24 aa, Artificial sequence
  synthetic peptide
LIGKSHTEDDIIIATKNGKVRGMN

SEQ ID NO: 10623 - protein, 24 aa, Artificial sequence
  synthetic peptide
IGKSHTEDDIIIATKNGKVRGMNL

SEQ ID NO: 10624 - protein, 24 aa, Artificial sequence
  synthetic peptide
GKSHTEDDIIIATKNGKVRGMNLT

SEQ ID NO: 10625 - protein, 24 aa, Artificial sequence
  synthetic peptide
KSHTEDDIIIATKNGKVRGMNLTV

SEQ ID NO: 10626 - protein, 24 aa, Artificial sequence
  synthetic peptide
SHTEDDIIIATKNGKVRGMNLTVF

SEQ ID NO: 10627 - protein, 24 aa, Artificial sequence
  synthetic peptide
HTEDDIIIATKNGKVRGMNLTVFG

SEQ ID NO: 10628 - protein, 24 aa, Artificial sequence
  synthetic peptide
TEDDIIIATKNGKVRGMNLTVFGG

SEQ ID NO: 10629 - protein, 24 aa, Artificial sequence
  synthetic peptide
EDDIIIATKNGKVRGMNLTVFGGT

SEQ ID NO: 10630 - protein, 24 aa, Artificial sequence
  synthetic peptide
DDIIIATKNGKVRGMNLTVFGGTV

SEQ ID NO: 10631 - protein, 24 aa, Artificial sequence
  synthetic peptide
DIIIATKNGKVRGMNLTVFGGTVT

SEQ ID NO: 10632 - protein, 24 aa, Artificial sequence
  synthetic peptide
IIIATKNGKVRGMNLTVFGGTVTA

SEQ ID NO: 10633 - protein, 24 aa, Artificial sequence
  synthetic peptide
IIATKNGKVRGMNLTVFGGTVTAF

SEQ ID NO: 10634 - protein, 24 aa, Artificial sequence
  synthetic peptide
IATKNGKVRGMNLTVFGGTVTAFL

SEQ ID NO: 10635 - protein, 24 aa, Artificial sequence
  synthetic peptide
ATKNGKVRGMNLTVFGGTVTAFLG

SEQ ID NO: 10636 - protein, 24 aa, Artificial sequence
  synthetic peptide
TKNGKVRGMNLTVFGGTVTAFLGI

SEQ ID NO: 10637 - protein, 24 aa, Artificial sequence
  synthetic peptide
KNGKVRGMNLTVFGGTVTAFLGIP

SEQ ID NO: 10638 - protein, 24 aa, Artificial sequence
  synthetic peptide
NGKVRGMNLTVFGGTVTAFLGIPY

SEQ ID NO: 10639 - protein, 24 aa, Artificial sequence
  synthetic peptide
GKVRGMNLTVFGGTVTAFLGIPYA

SEQ ID NO: 10640 - protein, 24 aa, Artificial sequence
  synthetic peptide
KVRGMNLTVFGGTVTAFLGIPYAQ

SEQ ID NO: 10641 - protein, 24 aa, Artificial sequence
  synthetic peptide
VRGMNLTVFGGTVTAFLGIPYAQP

SEQ ID NO: 10642 - protein, 24 aa, Artificial sequence
  synthetic peptide
RGMNLTVFGGTVTAFLGIPYAQPP

SEQ ID NO: 10643 - protein, 24 aa, Artificial sequence
  synthetic peptide
GMNLTVFGGTVTAFLGIPYAQPPL

SEQ ID NO: 10644 - protein, 24 aa, Artificial sequence
  synthetic peptide
MNLTVFGGTVTAFLGIPYAQPPLG

SEQ ID NO: 10645 - protein, 24 aa, Artificial sequence
  synthetic peptide
NLTVFGGTVTAFLGIPYAQPPLGR

SEQ ID NO: 10646 - protein, 24 aa, Artificial sequence
  synthetic peptide
LTVFGGTVTAFLGIPYAQPPLGRL

SEQ ID NO: 10647 - protein, 24 aa, Artificial sequence
  synthetic peptide
TVFGGTVTAFLGIPYAQPPLGRLR

SEQ ID NO: 10648 - protein, 24 aa, Artificial sequence
  synthetic peptide
VFGGTVTAFLGIPYAQPPLGRLRF

SEQ ID NO: 10649 - protein, 24 aa, Artificial sequence
  synthetic peptide
FGGTVTAFLGIPYAQPPLGRLRFK

SEQ ID NO: 10650 - protein, 24 aa, Artificial sequence
  synthetic peptide
GGTVTAFLGIPYAQPPLGRLRFKK

SEQ ID NO: 10651 - protein, 24 aa, Artificial sequence
  synthetic peptide
GTVTAFLGIPYAQPPLGRLRFKKP

SEQ ID NO: 10652 - protein, 24 aa, Artificial sequence
  synthetic peptide
TVTAFLGIPYAQPPLGRLRFKKPQ

SEQ ID NO: 10653 - protein, 24 aa, Artificial sequence
  synthetic peptide
VTAFLGIPYAQPPLGRLRFKKPQS

SEQ ID NO: 10654 - protein, 24 aa, Artificial sequence
  synthetic peptide
TAFLGIPYAQPPLGRLRFKKPQSL

SEQ ID NO: 10655 - protein, 24 aa, Artificial sequence
  synthetic peptide
AFLGIPYAQPPLGRLRFKKPQSLT

SEQ ID NO: 10656 - protein, 24 aa, Artificial sequence
  synthetic peptide
FLGIPYAQPPLGRLRFKKPQSLTK

SEQ ID NO: 10657 - protein, 24 aa, Artificial sequence
  synthetic peptide
LGIPYAQPPLGRLRFKKPQSLTKW

SEQ ID NO: 10658 - protein, 24 aa, Artificial sequence
  synthetic peptide
GIPYAQPPLGRLRFKKPQSLTKWS

SEQ ID NO: 10659 - protein, 24 aa, Artificial sequence
  synthetic peptide
IPYAQPPLGRLRFKKPQSLTKWSD

SEQ ID NO: 10660 - protein, 24 aa, Artificial sequence
  synthetic peptide
PYAQPPLGRLRFKKPQSLTKWSDI

SEQ ID NO: 10661 - protein, 24 aa, Artificial sequence
  synthetic peptide
YAQPPLGRLRFKKPQSLTKWSDIW

SEQ ID NO: 10662 - protein, 24 aa, Artificial sequence
  synthetic peptide
AQPPLGRLRFKKPQSLTKWSDIWN

SEQ ID NO: 10663 - protein, 24 aa, Artificial sequence
  synthetic peptide
QPPLGRLRFKKPQSLTKWSDIWNA

SEQ ID NO: 10664 - protein, 24 aa, Artificial sequence
  synthetic peptide
PPLGRLRFKKPQSLTKWSDIWNAT

SEQ ID NO: 10665 - protein, 24 aa, Artificial sequence
  synthetic peptide
PLGRLRFKKPQSLTKWSDIWNATK

SEQ ID NO: 10666 - protein, 24 aa, Artificial sequence
  synthetic peptide
LGRLRFKKPQSLTKWSDIWNATKY

SEQ ID NO: 10667 - protein, 24 aa, Artificial sequence
  synthetic peptide
GRLRFKKPQSLTKWSDIWNATKYA

SEQ ID NO: 10668 - protein, 24 aa, Artificial sequence
  synthetic peptide
RLRFKKPQSLTKWSDIWNATKYAN

SEQ ID NO: 10669 - protein, 24 aa, Artificial sequence
  synthetic peptide
LRFKKPQSLTKWSDIWNATKYANS

SEQ ID NO: 10670 - protein, 24 aa, Artificial sequence
  synthetic peptide
RFKKPQSLTKWSDIWNATKYANSC

SEQ ID NO: 10671 - protein, 24 aa, Artificial sequence
  synthetic peptide
FKKPQSLTKWSDIWNATKYANSCC

SEQ ID NO: 10672 - protein, 24 aa, Artificial sequence
  synthetic peptide
KKPQSLTKWSDIWNATKYANSCCQ

SEQ ID NO: 10673 - protein, 24 aa, Artificial sequence
  synthetic peptide
KPQSLTKWSDIWNATKYANSCCQN

SEQ ID NO: 10674 - protein, 24 aa, Artificial sequence
  synthetic peptide
PQSLTKWSDIWNATKYANSCCQNI

SEQ ID NO: 10675 - protein, 24 aa, Artificial sequence
  synthetic peptide
QSLTKWSDIWNATKYANSCCQNID

SEQ ID NO: 10676 - protein, 24 aa, Artificial sequence
  synthetic peptide
SLTKWSDIWNATKYANSCCQNIDQ

SEQ ID NO: 10677 - protein, 24 aa, Artificial sequence
  synthetic peptide
LTKWSDIWNATKYANSCCQNIDQS

SEQ ID NO: 10678 - protein, 24 aa, Artificial sequence
  synthetic peptide
TKWSDIWNATKYANSCCQNIDQSF

SEQ ID NO: 10679 - protein, 24 aa, Artificial sequence
  synthetic peptide
KWSDIWNATKYANSCCQNIDQSFP

SEQ ID NO: 10680 - protein, 24 aa, Artificial sequence
  synthetic peptide
WSDIWNATKYANSCCQNIDQSFPG

SEQ ID NO: 10681 - protein, 24 aa, Artificial sequence
  synthetic peptide
SDIWNATKYANSCCQNIDQSFPGF

SEQ ID NO: 10682 - protein, 24 aa, Artificial sequence
  synthetic peptide
DIWNATKYANSCCQNIDQSFPGFH

SEQ ID NO: 10683 - protein, 24 aa, Artificial sequence
  synthetic peptide
IWNATKYANSCCQNIDQSFPGFHG

SEQ ID NO: 10684 - protein, 24 aa, Artificial sequence
  synthetic peptide
WNATKYANSCCQNIDQSFPGFHGS

SEQ ID NO: 10685 - protein, 24 aa, Artificial sequence
  synthetic peptide
NATKYANSCCQNIDQSFPGFHGSE

SEQ ID NO: 10686 - protein, 24 aa, Artificial sequence
  synthetic peptide
ATKYANSCCQNIDQSFPGFHGSEM

SEQ ID NO: 10687 - protein, 24 aa, Artificial sequence
  synthetic peptide
TKYANSCCQNIDQSFPGFHGSEMW

SEQ ID NO: 10688 - protein, 24 aa, Artificial sequence
  synthetic peptide
KYANSCCQNIDQSFPGFHGSEMWN

SEQ ID NO: 10689 - protein, 24 aa, Artificial sequence
  synthetic peptide
YANSCCQNIDQSFPGFHGSEMWNP

SEQ ID NO: 10690 - protein, 24 aa, Artificial sequence
  synthetic peptide
ANSCCQNIDQSFPGFHGSEMWNPN

SEQ ID NO: 10691 - protein, 24 aa, Artificial sequence
  synthetic peptide
NSCCQNIDQSFPGFHGSEMWNPNT

SEQ ID NO: 10692 - protein, 24 aa, Artificial sequence
  synthetic peptide
SCCQNIDQSFPGFHGSEMWNPNTD

SEQ ID NO: 10693 - protein, 24 aa, Artificial sequence
  synthetic peptide
CCQNIDQSFPGFHGSEMWNPNTDL

SEQ ID NO: 10694 - protein, 24 aa, Artificial sequence
  synthetic peptide
CQNIDQSFPGFHGSEMWNPNTDLS

SEQ ID NO: 10695 - protein, 24 aa, Artificial sequence
  synthetic peptide
QNIDQSFPGFHGSEMWNPNTDLSE

SEQ ID NO: 10696 - protein, 24 aa, Artificial sequence
  synthetic peptide
NIDQSFPGFHGSEMWNPNTDLSED

SEQ ID NO: 10697 - protein, 24 aa, Artificial sequence
  synthetic peptide
IDQSFPGFHGSEMWNPNTDLSEDC

SEQ ID NO: 10698 - protein, 24 aa, Artificial sequence
  synthetic peptide
DQSFPGFHGSEMWNPNTDLSEDCL

SEQ ID NO: 10699 - protein, 24 aa, Artificial sequence
  synthetic peptide
QSFPGFHGSEMWNPNTDLSEDCLY

SEQ ID NO: 10700 - protein, 24 aa, Artificial sequence
  synthetic peptide
SFPGFHGSEMWNPNTDLSEDCLYL

SEQ ID NO: 10701 - protein, 24 aa, Artificial sequence
  synthetic peptide
FPGFHGSEMWNPNTDLSEDCLYLN

SEQ ID NO: 10702 - protein, 24 aa, Artificial sequence
  synthetic peptide
PGFHGSEMWNPNTDLSEDCLYLNV

SEQ ID NO: 10703 - protein, 24 aa, Artificial sequence
  synthetic peptide
GFHGSEMWNPNTDLSEDCLYLNVW

SEQ ID NO: 10704 - protein, 24 aa, Artificial sequence
  synthetic peptide
FHGSEMWNPNTDLSEDCLYLNVWI

SEQ ID NO: 10705 - protein, 24 aa, Artificial sequence
  synthetic peptide
HGSEMWNPNTDLSEDCLYLNVWIP

SEQ ID NO: 10706 - protein, 24 aa, Artificial sequence
  synthetic peptide
GSEMWNPNTDLSEDCLYLNVWIPA

SEQ ID NO: 10707 - protein, 24 aa, Artificial sequence
  synthetic peptide
SEMWNPNTDLSEDCLYLNVWIPAP

SEQ ID NO: 10708 - protein, 24 aa, Artificial sequence
  synthetic peptide
EMWNPNTDLSEDCLYLNVWIPAPK

SEQ ID NO: 10709 - protein, 24 aa, Artificial sequence
  synthetic peptide
MWNPNTDLSEDCLYLNVWIPAPKP

SEQ ID NO: 10710 - protein, 24 aa, Artificial sequence
  synthetic peptide
WNPNTDLSEDCLYLNVWIPAPKPK

SEQ ID NO: 10711 - protein, 24 aa, Artificial sequence
  synthetic peptide
NPNTDLSEDCLYLNVWIPAPKPKN

SEQ ID NO: 10712 - protein, 24 aa, Artificial sequence
  synthetic peptide
PNTDLSEDCLYLNVWIPAPKPKNA

SEQ ID NO: 10713 - protein, 24 aa, Artificial sequence
  synthetic peptide
NTDLSEDCLYLNVWIPAPKPKNAT

SEQ ID NO: 10714 - protein, 24 aa, Artificial sequence
  synthetic peptide
TDLSEDCLYLNVWIPAPKPKNATV

SEQ ID NO: 10715 - protein, 24 aa, Artificial sequence
  synthetic peptide
DLSEDCLYLNVWIPAPKPKNATVL

SEQ ID NO: 10716 - protein, 24 aa, Artificial sequence
  synthetic peptide
LSEDCLYLNVWIPAPKPKNATVLI

SEQ ID NO: 10717 - protein, 24 aa, Artificial sequence
  synthetic peptide
SEDCLYLNVWIPAPKPKNATVLIW

SEQ ID NO: 10718 - protein, 24 aa, Artificial sequence
  synthetic peptide
EDCLYLNVWIPAPKPKNATVLIWI

SEQ ID NO: 10719 - protein, 24 aa, Artificial sequence
  synthetic peptide
DCLYLNVWIPAPKPKNATVLIWIY

SEQ ID NO: 10720 - protein, 24 aa, Artificial sequence
  synthetic peptide
CLYLNVWIPAPKPKNATVLIWIYG

SEQ ID NO: 10721 - protein, 24 aa, Artificial sequence
  synthetic peptide
LYLNVWIPAPKPKNATVLIWIYGG

SEQ ID NO: 10722 - protein, 24 aa, Artificial sequence
  synthetic peptide
YLNVWIPAPKPKNATVLIWIYGGG

SEQ ID NO: 10723 - protein, 24 aa, Artificial sequence
  synthetic peptide
LNVWIPAPKPKNATVLIWIYGGGF

SEQ ID NO: 10724 - protein, 24 aa, Artificial sequence
  synthetic peptide
NVWIPAPKPKNATVLIWIYGGGFQ

SEQ ID NO: 10725 - protein, 24 aa, Artificial sequence
  synthetic peptide
VWIPAPKPKNATVLIWIYGGGFQT

SEQ ID NO: 10726 - protein, 24 aa, Artificial sequence
  synthetic peptide
WIPAPKPKNATVLIWIYGGGFQTG

SEQ ID NO: 10727 - protein, 24 aa, Artificial sequence
  synthetic peptide
IPAPKPKNATVLIWIYGGGFQTGT

SEQ ID NO: 10728 - protein, 24 aa, Artificial sequence
  synthetic peptide
PAPKPKNATVLIWIYGGGFQTGTS

SEQ ID NO: 10729 - protein, 24 aa, Artificial sequence
  synthetic peptide
APKPKNATVLIWIYGGGFQTGTSS

SEQ ID NO: 10730 - protein, 24 aa, Artificial sequence
  synthetic peptide
PKPKNATVLIWIYGGGFQTGTSSL

SEQ ID NO: 10731 - protein, 24 aa, Artificial sequence
  synthetic peptide
KPKNATVLIWIYGGGFQTGTSSLH

SEQ ID NO: 10732 - protein, 24 aa, Artificial sequence
  synthetic peptide
PKNATVLIWIYGGGFQTGTSSLHV

SEQ ID NO: 10733 - protein, 24 aa, Artificial sequence
  synthetic peptide
KNATVLIWIYGGGFQTGTSSLHVY

SEQ ID NO: 10734 - protein, 24 aa, Artificial sequence
  synthetic peptide
NATVLIWIYGGGFQTGTSSLHVYD

SEQ ID NO: 10735 - protein, 24 aa, Artificial sequence
  synthetic peptide
ATVLIWIYGGGFQTGTSSLHVYDG

SEQ ID NO: 10736 - protein, 24 aa, Artificial sequence
  synthetic peptide
TVLIWIYGGGFQTGTSSLHVYDGK

SEQ ID NO: 10737 - protein, 24 aa, Artificial sequence
  synthetic peptide
VLIWIYGGGFQTGTSSLHVYDGKF

SEQ ID NO: 10738 - protein, 24 aa, Artificial sequence
  synthetic peptide
LIWIYGGGFQTGTSSLHVYDGKFL

SEQ ID NO: 10739 - protein, 24 aa, Artificial sequence
  synthetic peptide
IWIYGGGFQTGTSSLHVYDGKFLA

SEQ ID NO: 10740 - protein, 24 aa, Artificial sequence
  synthetic peptide
WIYGGGFQTGTSSLHVYDGKFLAR

SEQ ID NO: 10741 - protein, 24 aa, Artificial sequence
  synthetic peptide
IYGGGFQTGTSSLHVYDGKFLARV

SEQ ID NO: 10742 - protein, 24 aa, Artificial sequence
  synthetic peptide
YGGGFQTGTSSLHVYDGKFLARVE

SEQ ID NO: 10743 - protein, 24 aa, Artificial sequence
  synthetic peptide
GGGFQTGTSSLHVYDGKFLARVER

SEQ ID NO: 10744 - protein, 24 aa, Artificial sequence
  synthetic peptide
GGFQTGTSSLHVYDGKFLARVERV

SEQ ID NO: 10745 - protein, 24 aa, Artificial sequence
  synthetic peptide
GFQTGTSSLHVYDGKFLARVERVI

SEQ ID NO: 10746 - protein, 24 aa, Artificial sequence
  synthetic peptide
FQTGTSSLHVYDGKFLARVERVIV

SEQ ID NO: 10747 - protein, 24 aa, Artificial sequence
  synthetic peptide
QTGTSSLHVYDGKFLARVERVIVV

SEQ ID NO: 10748 - protein, 24 aa, Artificial sequence
  synthetic peptide
TGTSSLHVYDGKFLARVERVIVVS

SEQ ID NO: 10749 - protein, 24 aa, Artificial sequence
  synthetic peptide
GTSSLHVYDGKFLARVERVIVVSM

SEQ ID NO: 10750 - protein, 24 aa, Artificial sequence
  synthetic peptide
TSSLHVYDGKFLARVERVIVVSMN

SEQ ID NO: 10751 - protein, 24 aa, Artificial sequence
  synthetic peptide
SSLHVYDGKFLARVERVIVVSMNY

SEQ ID NO: 10752 - protein, 24 aa, Artificial sequence
  synthetic peptide
SLHVYDGKFLARVERVIVVSMNYR

SEQ ID NO: 10753 - protein, 24 aa, Artificial sequence
  synthetic peptide
LHVYDGKFLARVERVIVVSMNYRV

SEQ ID NO: 10754 - protein, 24 aa, Artificial sequence
  synthetic peptide
HVYDGKFLARVERVIVVSMNYRVG

SEQ ID NO: 10755 - protein, 24 aa, Artificial sequence
  synthetic peptide
VYDGKFLARVERVIVVSMNYRVGA

SEQ ID NO: 10756 - protein, 24 aa, Artificial sequence
  synthetic peptide
YDGKFLARVERVIVVSMNYRVGAL

SEQ ID NO: 10757 - protein, 24 aa, Artificial sequence
  synthetic peptide
DGKFLARVERVIVVSMNYRVGALG

SEQ ID NO: 10758 - protein, 24 aa, Artificial sequence
  synthetic peptide
GKFLARVERVIVVSMNYRVGALGF

SEQ ID NO: 10759 - protein, 24 aa, Artificial sequence
  synthetic peptide
KFLARVERVIVVSMNYRVGALGFL

SEQ ID NO: 10760 - protein, 24 aa, Artificial sequence
  synthetic peptide
FLARVERVIVVSMNYRVGALGFLA

SEQ ID NO: 10761 - protein, 24 aa, Artificial sequence
  synthetic peptide
LARVERVIVVSMNYRVGALGFLAL

SEQ ID NO: 10762 - protein, 24 aa, Artificial sequence
  synthetic peptide
ARVERVIVVSMNYRVGALGFLALP

SEQ ID NO: 10763 - protein, 24 aa, Artificial sequence
  synthetic peptide
RVERVIVVSMNYRVGALGFLALPG

SEQ ID NO: 10764 - protein, 24 aa, Artificial sequence
  synthetic peptide
VERVIVVSMNYRVGALGFLALPGN

SEQ ID NO: 10765 - protein, 24 aa, Artificial sequence
  synthetic peptide
ERVIVVSMNYRVGALGFLALPGNP

SEQ ID NO: 10766 - protein, 24 aa, Artificial sequence
  synthetic peptide
RVIVVSMNYRVGALGFLALPGNPE

SEQ ID NO: 10767 - protein, 24 aa, Artificial sequence
  synthetic peptide
VIVVSMNYRVGALGFLALPGNPEA

SEQ ID NO: 10768 - protein, 24 aa, Artificial sequence
  synthetic peptide
IVVSMNYRVGALGFLALPGNPEAP

SEQ ID NO: 10769 - protein, 24 aa, Artificial sequence
  synthetic peptide
VVSMNYRVGALGFLALPGNPEAPG

SEQ ID NO: 10770 - protein, 24 aa, Artificial sequence
  synthetic peptide
VSMNYRVGALGFLALPGNPEAPGN

SEQ ID NO: 10771 - protein, 24 aa, Artificial sequence
  synthetic peptide
SMNYRVGALGFLALPGNPEAPGNM

SEQ ID NO: 10772 - protein, 24 aa, Artificial sequence
  synthetic peptide
MNYRVGALGFLALPGNPEAPGNMG

SEQ ID NO: 10773 - protein, 24 aa, Artificial sequence
  synthetic peptide
NYRVGALGFLALPGNPEAPGNMGL

SEQ ID NO: 10774 - protein, 24 aa, Artificial sequence
  synthetic peptide
YRVGALGFLALPGNPEAPGNMGLF

SEQ ID NO: 10775 - protein, 24 aa, Artificial sequence
  synthetic peptide
RVGALGFLALPGNPEAPGNMGLFD

SEQ ID NO: 10776 - protein, 24 aa, Artificial sequence
  synthetic peptide
VGALGFLALPGNPEAPGNMGLFDQ

SEQ ID NO: 10777 - protein, 24 aa, Artificial sequence
  synthetic peptide
GALGFLALPGNPEAPGNMGLFDQQ

SEQ ID NO: 10778 - protein, 24 aa, Artificial sequence
  synthetic peptide
ALGFLALPGNPEAPGNMGLFDQQL

SEQ ID NO: 10779 - protein, 24 aa, Artificial sequence
  synthetic peptide
LGFLALPGNPEAPGNMGLFDQQLA

SEQ ID NO: 10780 - protein, 24 aa, Artificial sequence
  synthetic peptide
GFLALPGNPEAPGNMGLFDQQLAL

SEQ ID NO: 10781 - protein, 24 aa, Artificial sequence
  synthetic peptide
FLALPGNPEAPGNMGLFDQQLALQ

SEQ ID NO: 10782 - protein, 24 aa, Artificial sequence
  synthetic peptide
LALPGNPEAPGNMGLFDQQLALQW

SEQ ID NO: 10783 - protein, 24 aa, Artificial sequence
  synthetic peptide
ALPGNPEAPGNMGLFDQQLALQWV

SEQ ID NO: 10784 - protein, 24 aa, Artificial sequence
  synthetic peptide
LPGNPEAPGNMGLFDQQLALQWVQ

SEQ ID NO: 10785 - protein, 24 aa, Artificial sequence
  synthetic peptide
PGNPEAPGNMGLFDQQLALQWVQK

SEQ ID NO: 10786 - protein, 24 aa, Artificial sequence
  synthetic peptide
GNPEAPGNMGLFDQQLALQWVQKN

SEQ ID NO: 10787 - protein, 24 aa, Artificial sequence
  synthetic peptide
NPEAPGNMGLFDQQLALQWVQKNI

SEQ ID NO: 10788 - protein, 24 aa, Artificial sequence
  synthetic peptide
PEAPGNMGLFDQQLALQWVQKNIA

SEQ ID NO: 10789 - protein, 24 aa, Artificial sequence
  synthetic peptide
EAPGNMGLFDQQLALQWVQKNIAA

SEQ ID NO: 10790 - protein, 24 aa, Artificial sequence
  synthetic peptide
APGNMGLFDQQLALQWVQKNIAAF

SEQ ID NO: 10791 - protein, 24 aa, Artificial sequence
  synthetic peptide
PGNMGLFDQQLALQWVQKNIAAFG

SEQ ID NO: 10792 - protein, 24 aa, Artificial sequence
  synthetic peptide
GNMGLFDQQLALQWVQKNIAAFGG

SEQ ID NO: 10793 - protein, 24 aa, Artificial sequence
  synthetic peptide
NMGLFDQQLALQWVQKNIAAFGGN

SEQ ID NO: 10794 - protein, 24 aa, Artificial sequence
  synthetic peptide
MGLFDQQLALQWVQKNIAAFGGNP

SEQ ID NO: 10795 - protein, 24 aa, Artificial sequence
  synthetic peptide
GLFDQQLALQWVQKNIAAFGGNPK

SEQ ID NO: 10796 - protein, 24 aa, Artificial sequence
  synthetic peptide
LFDQQLALQWVQKNIAAFGGNPKS

SEQ ID NO: 10797 - protein, 24 aa, Artificial sequence
  synthetic peptide
FDQQLALQWVQKNIAAFGGNPKSV

SEQ ID NO: 10798 - protein, 24 aa, Artificial sequence
  synthetic peptide
DQQLALQWVQKNIAAFGGNPKSVT

SEQ ID NO: 10799 - protein, 24 aa, Artificial sequence
  synthetic peptide
QQLALQWVQKNIAAFGGNPKSVTL

SEQ ID NO: 10800 - protein, 24 aa, Artificial sequence
  synthetic peptide
QLALQWVQKNIAAFGGNPKSVTLF

SEQ ID NO: 10801 - protein, 24 aa, Artificial sequence
  synthetic peptide
LALQWVQKNIAAFGGNPKSVTLFG

SEQ ID NO: 10802 - protein, 24 aa, Artificial sequence
  synthetic peptide
ALQWVQKNIAAFGGNPKSVTLFGE

SEQ ID NO: 10803 - protein, 24 aa, Artificial sequence
  synthetic peptide
LQWVQKNIAAFGGNPKSVTLFGES

SEQ ID NO: 10804 - protein, 24 aa, Artificial sequence
  synthetic peptide
QWVQKNIAAFGGNPKSVTLFGESA

SEQ ID NO: 10805 - protein, 24 aa, Artificial sequence
  synthetic peptide
WVQKNIAAFGGNPKSVTLFGESAG

SEQ ID NO: 10806 - protein, 24 aa, Artificial sequence
  synthetic peptide
VQKNIAAFGGNPKSVTLFGESAGA

SEQ ID NO: 10807 - protein, 24 aa, Artificial sequence
  synthetic peptide
QKNIAAFGGNPKSVTLFGESAGAA

SEQ ID NO: 10808 - protein, 24 aa, Artificial sequence
  synthetic peptide
KNIAAFGGNPKSVTLFGESAGAAS

SEQ ID NO: 10809 - protein, 24 aa, Artificial sequence
  synthetic peptide
NIAAFGGNPKSVTLFGESAGAASV

SEQ ID NO: 10810 - protein, 24 aa, Artificial sequence
  synthetic peptide
IAAFGGNPKSVTLFGESAGAASVS

SEQ ID NO: 10811 - protein, 24 aa, Artificial sequence
  synthetic peptide
AAFGGNPKSVTLFGESAGAASVSL

SEQ ID NO: 10812 - protein, 24 aa, Artificial sequence
  synthetic peptide
AFGGNPKSVTLFGESAGAASVSLH

SEQ ID NO: 10813 - protein, 24 aa, Artificial sequence
  synthetic peptide
FGGNPKSVTLFGESAGAASVSLHL

SEQ ID NO: 10814 - protein, 24 aa, Artificial sequence
  synthetic peptide
GGNPKSVTLFGESAGAASVSLHLL

SEQ ID NO: 10815 - protein, 24 aa, Artificial sequence
  synthetic peptide
GNPKSVTLFGESAGAASVSLHLLS

SEQ ID NO: 10816 - protein, 24 aa, Artificial sequence
  synthetic peptide
NPKSVTLFGESAGAASVSLHLLSP

SEQ ID NO: 10817 - protein, 24 aa, Artificial sequence
  synthetic peptide
PKSVTLFGESAGAASVSLHLLSPG

SEQ ID NO: 10818 - protein, 24 aa, Artificial sequence
  synthetic peptide
KSVTLFGESAGAASVSLHLLSPGS

SEQ ID NO: 10819 - protein, 24 aa, Artificial sequence
  synthetic peptide
SVTLFGESAGAASVSLHLLSPGSH

SEQ ID NO: 10820 - protein, 24 aa, Artificial sequence
  synthetic peptide
VTLFGESAGAASVSLHLLSPGSHS

SEQ ID NO: 10821 - protein, 24 aa, Artificial sequence
  synthetic peptide
TLFGESAGAASVSLHLLSPGSHSL

SEQ ID NO: 10822 - protein, 24 aa, Artificial sequence
  synthetic peptide
LFGESAGAASVSLHLLSPGSHSLF

SEQ ID NO: 10823 - protein, 24 aa, Artificial sequence
  synthetic peptide
FGESAGAASVSLHLLSPGSHSLFT

SEQ ID NO: 10824 - protein, 24 aa, Artificial sequence
  synthetic peptide
GESAGAASVSLHLLSPGSHSLFTR

SEQ ID NO: 10825 - protein, 24 aa, Artificial sequence
  synthetic peptide
ESAGAASVSLHLLSPGSHSLFTRA

SEQ ID NO: 10826 - protein, 24 aa, Artificial sequence
  synthetic peptide
SAGAASVSLHLLSPGSHSLFTRAI

SEQ ID NO: 10827 - protein, 24 aa, Artificial sequence
  synthetic peptide
AGAASVSLHLLSPGSHSLFTRAIL

SEQ ID NO: 10828 - protein, 24 aa, Artificial sequence
  synthetic peptide
GAASVSLHLLSPGSHSLFTRAILQ

SEQ ID NO: 10829 - protein, 24 aa, Artificial sequence
  synthetic peptide
AASVSLHLLSPGSHSLFTRAILQS

SEQ ID NO: 10830 - protein, 24 aa, Artificial sequence
  synthetic peptide
ASVSLHLLSPGSHSLFTRAILQSG

SEQ ID NO: 10831 - protein, 24 aa, Artificial sequence
  synthetic peptide
SVSLHLLSPGSHSLFTRAILQSGS

SEQ ID NO: 10832 - protein, 24 aa, Artificial sequence
  synthetic peptide
VSLHLLSPGSHSLFTRAILQSGSF

SEQ ID NO: 10833 - protein, 24 aa, Artificial sequence
  synthetic peptide
SLHLLSPGSHSLFTRAILQSGSFN

SEQ ID NO: 10834 - protein, 24 aa, Artificial sequence
  synthetic peptide
LHLLSPGSHSLFTRAILQSGSFNA

SEQ ID NO: 10835 - protein, 24 aa, Artificial sequence
  synthetic peptide
HLLSPGSHSLFTRAILQSGSFNAP

SEQ ID NO: 10836 - protein, 24 aa, Artificial sequence
  synthetic peptide
LLSPGSHSLFTRAILQSGSFNAPW

SEQ ID NO: 10837 - protein, 24 aa, Artificial sequence
  synthetic peptide
LSPGSHSLFTRAILQSGSFNAPWA

SEQ ID NO: 10838 - protein, 24 aa, Artificial sequence
  synthetic peptide
SPGSHSLFTRAILQSGSFNAPWAV

SEQ ID NO: 10839 - protein, 24 aa, Artificial sequence
  synthetic peptide
PGSHSLFTRAILQSGSFNAPWAVT

SEQ ID NO: 10840 - protein, 24 aa, Artificial sequence
  synthetic peptide
GSHSLFTRAILQSGSFNAPWAVTS

SEQ ID NO: 10841 - protein, 24 aa, Artificial sequence
  synthetic peptide
SHSLFTRAILQSGSFNAPWAVTSL

SEQ ID NO: 10842 - protein, 24 aa, Artificial sequence
  synthetic peptide
HSLFTRAILQSGSFNAPWAVTSLY

SEQ ID NO: 10843 - protein, 24 aa, Artificial sequence
  synthetic peptide
SLFTRAILQSGSFNAPWAVTSLYE

SEQ ID NO: 10844 - protein, 24 aa, Artificial sequence
  synthetic peptide
LFTRAILQSGSFNAPWAVTSLYEA

SEQ ID NO: 10845 - protein, 24 aa, Artificial sequence
  synthetic peptide
FTRAILQSGSFNAPWAVTSLYEAR

SEQ ID NO: 10846 - protein, 24 aa, Artificial sequence
  synthetic peptide
TRAILQSGSFNAPWAVTSLYEARN

SEQ ID NO: 10847 - protein, 24 aa, Artificial sequence
  synthetic peptide
RAILQSGSFNAPWAVTSLYEARNR

SEQ ID NO: 10848 - protein, 24 aa, Artificial sequence
  synthetic peptide
AILQSGSFNAPWAVTSLYEARNRT

SEQ ID NO: 10849 - protein, 24 aa, Artificial sequence
  synthetic peptide
ILQSGSFNAPWAVTSLYEARNRTL

SEQ ID NO: 10850 - protein, 24 aa, Artificial sequence
  synthetic peptide
LQSGSFNAPWAVTSLYEARNRTLN

SEQ ID NO: 10851 - protein, 24 aa, Artificial sequence
  synthetic peptide
QSGSFNAPWAVTSLYEARNRTLNL

SEQ ID NO: 10852 - protein, 24 aa, Artificial sequence
  synthetic peptide
SGSFNAPWAVTSLYEARNRTLNLA

SEQ ID NO: 10853 - protein, 24 aa, Artificial sequence
  synthetic peptide
GSFNAPWAVTSLYEARNRTLNLAK

SEQ ID NO: 10854 - protein, 24 aa, Artificial sequence
  synthetic peptide
SFNAPWAVTSLYEARNRTLNLAKL

SEQ ID NO: 10855 - protein, 24 aa, Artificial sequence
  synthetic peptide
FNAPWAVTSLYEARNRTLNLAKLT

SEQ ID NO: 10856 - protein, 24 aa, Artificial sequence
  synthetic peptide
NAPWAVTSLYEARNRTLNLAKLTG

SEQ ID NO: 10857 - protein, 24 aa, Artificial sequence
  synthetic peptide
APWAVTSLYEARNRTLNLAKLTGC

SEQ ID NO: 10858 - protein, 24 aa, Artificial sequence
  synthetic peptide
PWAVTSLYEARNRTLNLAKLTGCS

SEQ ID NO: 10859 - protein, 24 aa, Artificial sequence
  synthetic peptide
WAVTSLYEARNRTLNLAKLTGCSR

SEQ ID NO: 10860 - protein, 24 aa, Artificial sequence
  synthetic peptide
AVTSLYEARNRTLNLAKLTGCSRE

SEQ ID NO: 10861 - protein, 24 aa, Artificial sequence
  synthetic peptide
VTSLYEARNRTLNLAKLTGCSREN

SEQ ID NO: 10862 - protein, 24 aa, Artificial sequence
  synthetic peptide
TSLYEARNRTLNLAKLTGCSRENE

SEQ ID NO: 10863 - protein, 24 aa, Artificial sequence
  synthetic peptide
SLYEARNRTLNLAKLTGCSRENET

SEQ ID NO: 10864 - protein, 24 aa, Artificial sequence
  synthetic peptide
LYEARNRTLNLAKLTGCSRENETE

SEQ ID NO: 10865 - protein, 24 aa, Artificial sequence
  synthetic peptide
YEARNRTLNLAKLTGCSRENETEI

SEQ ID NO: 10866 - protein, 24 aa, Artificial sequence
  synthetic peptide
EARNRTLNLAKLTGCSRENETEII

SEQ ID NO: 10867 - protein, 24 aa, Artificial sequence
  synthetic peptide
ARNRTLNLAKLTGCSRENETEIIK

SEQ ID NO: 10868 - protein, 24 aa, Artificial sequence
  synthetic peptide
RNRTLNLAKLTGCSRENETEIIKC

SEQ ID NO: 10869 - protein, 24 aa, Artificial sequence
  synthetic peptide
NRTLNLAKLTGCSRENETEIIKCL

SEQ ID NO: 10870 - protein, 24 aa, Artificial sequence
  synthetic peptide
RTLNLAKLTGCSRENETEIIKCLR

SEQ ID NO: 10871 - protein, 24 aa, Artificial sequence
  synthetic peptide
TLNLAKLTGCSRENETEIIKCLRN

SEQ ID NO: 10872 - protein, 24 aa, Artificial sequence
  synthetic peptide
LNLAKLTGCSRENETEIIKCLRNK

SEQ ID NO: 10873 - protein, 24 aa, Artificial sequence
  synthetic peptide
NLAKLTGCSRENETEIIKCLRNKD

SEQ ID NO: 10874 - protein, 24 aa, Artificial sequence
  synthetic peptide
LAKLTGCSRENETEIIKCLRNKDP

SEQ ID NO: 10875 - protein, 24 aa, Artificial sequence
  synthetic peptide
AKLTGCSRENETEIIKCLRNKDPQ

SEQ ID NO: 10876 - protein, 24 aa, Artificial sequence
  synthetic peptide
KLTGCSRENETEIIKCLRNKDPQE

SEQ ID NO: 10877 - protein, 24 aa, Artificial sequence
  synthetic peptide
LTGCSRENETEIIKCLRNKDPQEI

SEQ ID NO: 10878 - protein, 24 aa, Artificial sequence
  synthetic peptide
TGCSRENETEIIKCLRNKDPQEIL

SEQ ID NO: 10879 - protein, 24 aa, Artificial sequence
  synthetic peptide
GCSRENETEIIKCLRNKDPQEILL

SEQ ID NO: 10880 - protein, 24 aa, Artificial sequence
  synthetic peptide
CSRENETEIIKCLRNKDPQEILLN

SEQ ID NO: 10881 - protein, 24 aa, Artificial sequence
  synthetic peptide
SRENETEIIKCLRNKDPQEILLNE

SEQ ID NO: 10882 - protein, 24 aa, Artificial sequence
  synthetic peptide
RENETEIIKCLRNKDPQEILLNEA

SEQ ID NO: 10883 - protein, 24 aa, Artificial sequence
  synthetic peptide
ENETEIIKCLRNKDPQEILLNEAF

SEQ ID NO: 10884 - protein, 24 aa, Artificial sequence
  synthetic peptide
NETEIIKCLRNKDPQEILLNEAFV

SEQ ID NO: 10885 - protein, 24 aa, Artificial sequence
  synthetic peptide
ETEIIKCLRNKDPQEILLNEAFVV

SEQ ID NO: 10886 - protein, 24 aa, Artificial sequence
  synthetic peptide
TEIIKCLRNKDPQEILLNEAFVVP

SEQ ID NO: 10887 - protein, 24 aa, Artificial sequence
  synthetic peptide
EIIKCLRNKDPQEILLNEAFVVPY

SEQ ID NO: 10888 - protein, 24 aa, Artificial sequence
  synthetic peptide
IIKCLRNKDPQEILLNEAFVVPYG

SEQ ID NO: 10889 - protein, 24 aa, Artificial sequence
  synthetic peptide
IKCLRNKDPQEILLNEAFVVPYGT

SEQ ID NO: 10890 - protein, 24 aa, Artificial sequence
  synthetic peptide
KCLRNKDPQEILLNEAFVVPYGTP

SEQ ID NO: 10891 - protein, 24 aa, Artificial sequence
  synthetic peptide
CLRNKDPQEILLNEAFVVPYGTPL

SEQ ID NO: 10892 - protein, 24 aa, Artificial sequence
  synthetic peptide
LRNKDPQEILLNEAFVVPYGTPLS

SEQ ID NO: 10893 - protein, 24 aa, Artificial sequence
  synthetic peptide
RNKDPQEILLNEAFVVPYGTPLSV

SEQ ID NO: 10894 - protein, 24 aa, Artificial sequence
  synthetic peptide
NKDPQEILLNEAFVVPYGTPLSVN

SEQ ID NO: 10895 - protein, 24 aa, Artificial sequence
  synthetic peptide
KDPQEILLNEAFVVPYGTPLSVNF

SEQ ID NO: 10896 - protein, 24 aa, Artificial sequence
  synthetic peptide
DPQEILLNEAFVVPYGTPLSVNFG

SEQ ID NO: 10897 - protein, 24 aa, Artificial sequence
  synthetic peptide
PQEILLNEAFVVPYGTPLSVNFGP

SEQ ID NO: 10898 - protein, 24 aa, Artificial sequence
  synthetic peptide
QEILLNEAFVVPYGTPLSVNFGPT

SEQ ID NO: 10899 - protein, 24 aa, Artificial sequence
  synthetic peptide
EILLNEAFVVPYGTPLSVNFGPTV

SEQ ID NO: 10900 - protein, 24 aa, Artificial sequence
  synthetic peptide
ILLNEAFVVPYGTPLSVNFGPTVD

SEQ ID NO: 10901 - protein, 24 aa, Artificial sequence
  synthetic peptide
LLNEAFVVPYGTPLSVNFGPTVDG

SEQ ID NO: 10902 - protein, 24 aa, Artificial sequence
  synthetic peptide
LNEAFVVPYGTPLSVNFGPTVDGD

SEQ ID NO: 10903 - protein, 24 aa, Artificial sequence
  synthetic peptide
NEAFVVPYGTPLSVNFGPTVDGDF

SEQ ID NO: 10904 - protein, 24 aa, Artificial sequence
  synthetic peptide
EAFVVPYGTPLSVNFGPTVDGDFL

SEQ ID NO: 10905 - protein, 24 aa, Artificial sequence
  synthetic peptide
AFVVPYGTPLSVNFGPTVDGDFLT

SEQ ID NO: 10906 - protein, 24 aa, Artificial sequence
  synthetic peptide
FVVPYGTPLSVNFGPTVDGDFLTD

SEQ ID NO: 10907 - protein, 24 aa, Artificial sequence
  synthetic peptide
VVPYGTPLSVNFGPTVDGDFLTDM

SEQ ID NO: 10908 - protein, 24 aa, Artificial sequence
  synthetic peptide
VPYGTPLSVNFGPTVDGDFLTDMP

SEQ ID NO: 10909 - protein, 24 aa, Artificial sequence
  synthetic peptide
PYGTPLSVNFGPTVDGDFLTDMPD

SEQ ID NO: 10910 - protein, 24 aa, Artificial sequence
  synthetic peptide
YGTPLSVNFGPTVDGDFLTDMPDI

SEQ ID NO: 10911 - protein, 24 aa, Artificial sequence
  synthetic peptide
GTPLSVNFGPTVDGDFLTDMPDIL

SEQ ID NO: 10912 - protein, 24 aa, Artificial sequence
  synthetic peptide
TPLSVNFGPTVDGDFLTDMPDILL

SEQ ID NO: 10913 - protein, 24 aa, Artificial sequence
  synthetic peptide
PLSVNFGPTVDGDFLTDMPDILLE

SEQ ID NO: 10914 - protein, 24 aa, Artificial sequence
  synthetic peptide
LSVNFGPTVDGDFLTDMPDILLEL

SEQ ID NO: 10915 - protein, 24 aa, Artificial sequence
  synthetic peptide
SVNFGPTVDGDFLTDMPDILLELG

SEQ ID NO: 10916 - protein, 24 aa, Artificial sequence
  synthetic peptide
VNFGPTVDGDFLTDMPDILLELGQ

SEQ ID NO: 10917 - protein, 24 aa, Artificial sequence
  synthetic peptide
NFGPTVDGDFLTDMPDILLELGQF

SEQ ID NO: 10918 - protein, 24 aa, Artificial sequence
  synthetic peptide
FGPTVDGDFLTDMPDILLELGQFK

SEQ ID NO: 10919 - protein, 24 aa, Artificial sequence
  synthetic peptide
GPTVDGDFLTDMPDILLELGQFKK

SEQ ID NO: 10920 - protein, 24 aa, Artificial sequence
  synthetic peptide
PTVDGDFLTDMPDILLELGQFKKT

SEQ ID NO: 10921 - protein, 24 aa, Artificial sequence
  synthetic peptide
TVDGDFLTDMPDILLELGQFKKTQ

SEQ ID NO: 10922 - protein, 24 aa, Artificial sequence
  synthetic peptide
VDGDFLTDMPDILLELGQFKKTQI

SEQ ID NO: 10923 - protein, 24 aa, Artificial sequence
  synthetic peptide
DGDFLTDMPDILLELGQFKKTQIL

SEQ ID NO: 10924 - protein, 24 aa, Artificial sequence
  synthetic peptide
GDFLTDMPDILLELGQFKKTQILV

SEQ ID NO: 10925 - protein, 24 aa, Artificial sequence
  synthetic peptide
DFLTDMPDILLELGQFKKTQILVG

SEQ ID NO: 10926 - protein, 24 aa, Artificial sequence
  synthetic peptide
FLTDMPDILLELGQFKKTQILVGV

SEQ ID NO: 10927 - protein, 24 aa, Artificial sequence
  synthetic peptide
LTDMPDILLELGQFKKTQILVGVN

SEQ ID NO: 10928 - protein, 24 aa, Artificial sequence
  synthetic peptide
TDMPDILLELGQFKKTQILVGVNK

SEQ ID NO: 10929 - protein, 24 aa, Artificial sequence
  synthetic peptide
DMPDILLELGQFKKTQILVGVNKD

SEQ ID NO: 10930 - protein, 24 aa, Artificial sequence
  synthetic peptide
MPDILLELGQFKKTQILVGVNKDE

SEQ ID NO: 10931 - protein, 24 aa, Artificial sequence
  synthetic peptide
PDILLELGQFKKTQILVGVNKDEG

SEQ ID NO: 10932 - protein, 24 aa, Artificial sequence
  synthetic peptide
DILLELGQFKKTQILVGVNKDEGT

SEQ ID NO: 10933 - protein, 24 aa, Artificial sequence
  synthetic peptide
ILLELGQFKKTQILVGVNKDEGTA

SEQ ID NO: 10934 - protein, 24 aa, Artificial sequence
  synthetic peptide
LLELGQFKKTQILVGVNKDEGTAF

SEQ ID NO: 10935 - protein, 24 aa, Artificial sequence
  synthetic peptide
LELGQFKKTQILVGVNKDEGTAFL

SEQ ID NO: 10936 - protein, 24 aa, Artificial sequence
  synthetic peptide
ELGQFKKTQILVGVNKDEGTAFLV

SEQ ID NO: 10937 - protein, 24 aa, Artificial sequence
  synthetic peptide
LGQFKKTQILVGVNKDEGTAFLVY

SEQ ID NO: 10938 - protein, 24 aa, Artificial sequence
  synthetic peptide
GQFKKTQILVGVNKDEGTAFLVYG

SEQ ID NO: 10939 - protein, 24 aa, Artificial sequence
  synthetic peptide
QFKKTQILVGVNKDEGTAFLVYGA

SEQ ID NO: 10940 - protein, 24 aa, Artificial sequence
  synthetic peptide
FKKTQILVGVNKDEGTAFLVYGAP

SEQ ID NO: 10941 - protein, 24 aa, Artificial sequence
  synthetic peptide
KKTQILVGVNKDEGTAFLVYGAPG

SEQ ID NO: 10942 - protein, 24 aa, Artificial sequence
  synthetic peptide
KTQILVGVNKDEGTAFLVYGAPGF

SEQ ID NO: 10943 - protein, 24 aa, Artificial sequence
  synthetic peptide
TQILVGVNKDEGTAFLVYGAPGFS

SEQ ID NO: 10944 - protein, 24 aa, Artificial sequence
  synthetic peptide
QILVGVNKDEGTAFLVYGAPGFSK

SEQ ID NO: 10945 - protein, 24 aa, Artificial sequence
  synthetic peptide
ILVGVNKDEGTAFLVYGAPGFSKD

SEQ ID NO: 10946 - protein, 24 aa, Artificial sequence
  synthetic peptide
LVGVNKDEGTAFLVYGAPGFSKDN

SEQ ID NO: 10947 - protein, 24 aa, Artificial sequence
  synthetic peptide
VGVNKDEGTAFLVYGAPGFSKDNN

SEQ ID NO: 10948 - protein, 24 aa, Artificial sequence
  synthetic peptide
GVNKDEGTAFLVYGAPGFSKDNNS

SEQ ID NO: 10949 - protein, 24 aa, Artificial sequence
  synthetic peptide
VNKDEGTAFLVYGAPGFSKDNNSI

SEQ ID NO: 10950 - protein, 24 aa, Artificial sequence
  synthetic peptide
NKDEGTAFLVYGAPGFSKDNNSII

SEQ ID NO: 10951 - protein, 24 aa, Artificial sequence
  synthetic peptide
KDEGTAFLVYGAPGFSKDNNSIIT

SEQ ID NO: 10952 - protein, 24 aa, Artificial sequence
  synthetic peptide
DEGTAFLVYGAPGFSKDNNSIITR

SEQ ID NO: 10953 - protein, 24 aa, Artificial sequence
  synthetic peptide
EGTAFLVYGAPGFSKDNNSIITRK

SEQ ID NO: 10954 - protein, 24 aa, Artificial sequence
  synthetic peptide
GTAFLVYGAPGFSKDNNSIITRKE

SEQ ID NO: 10955 - protein, 24 aa, Artificial sequence
  synthetic peptide
TAFLVYGAPGFSKDNNSIITRKEF

SEQ ID NO: 10956 - protein, 24 aa, Artificial sequence
  synthetic peptide
AFLVYGAPGFSKDNNSIITRKEFQ

SEQ ID NO: 10957 - protein, 24 aa, Artificial sequence
  synthetic peptide
FLVYGAPGFSKDNNSIITRKEFQE

SEQ ID NO: 10958 - protein, 24 aa, Artificial sequence
  synthetic peptide
LVYGAPGFSKDNNSIITRKEFQEG

SEQ ID NO: 10959 - protein, 24 aa, Artificial sequence
  synthetic peptide
VYGAPGFSKDNNSIITRKEFQEGL

SEQ ID NO: 10960 - protein, 24 aa, Artificial sequence
  synthetic peptide
YGAPGFSKDNNSIITRKEFQEGLK

SEQ ID NO: 10961 - protein, 24 aa, Artificial sequence
  synthetic peptide
GAPGFSKDNNSIITRKEFQEGLKI

SEQ ID NO: 10962 - protein, 24 aa, Artificial sequence
  synthetic peptide
APGFSKDNNSIITRKEFQEGLKIF

SEQ ID NO: 10963 - protein, 24 aa, Artificial sequence
  synthetic peptide
PGFSKDNNSIITRKEFQEGLKIFF

SEQ ID NO: 10964 - protein, 24 aa, Artificial sequence
  synthetic peptide
GFSKDNNSIITRKEFQEGLKIFFP

SEQ ID NO: 10965 - protein, 24 aa, Artificial sequence
  synthetic peptide
FSKDNNSIITRKEFQEGLKIFFPG

SEQ ID NO: 10966 - protein, 24 aa, Artificial sequence
  synthetic peptide
SKDNNSIITRKEFQEGLKIFFPGV

SEQ ID NO: 10967 - protein, 24 aa, Artificial sequence
  synthetic peptide
KDNNSIITRKEFQEGLKIFFPGVS

SEQ ID NO: 10968 - protein, 24 aa, Artificial sequence
  synthetic peptide
DNNSIITRKEFQEGLKIFFPGVSE

SEQ ID NO: 10969 - protein, 24 aa, Artificial sequence
  synthetic peptide
NNSIITRKEFQEGLKIFFPGVSEF

SEQ ID NO: 10970 - protein, 24 aa, Artificial sequence
  synthetic peptide
NSIITRKEFQEGLKIFFPGVSEFG

SEQ ID NO: 10971 - protein, 24 aa, Artificial sequence
  synthetic peptide
SIITRKEFQEGLKIFFPGVSEFGK

SEQ ID NO: 10972 - protein, 24 aa, Artificial sequence
  synthetic peptide
IITRKEFQEGLKIFFPGVSEFGKE

SEQ ID NO: 10973 - protein, 24 aa, Artificial sequence
  synthetic peptide
ITRKEFQEGLKIFFPGVSEFGKES

SEQ ID NO: 10974 - protein, 24 aa, Artificial sequence
  synthetic peptide
TRKEFQEGLKIFFPGVSEFGKESI

SEQ ID NO: 10975 - protein, 24 aa, Artificial sequence
  synthetic peptide
RKEFQEGLKIFFPGVSEFGKESIL

SEQ ID NO: 10976 - protein, 24 aa, Artificial sequence
  synthetic peptide
KEFQEGLKIFFPGVSEFGKESILF

SEQ ID NO: 10977 - protein, 24 aa, Artificial sequence
  synthetic peptide
EFQEGLKIFFPGVSEFGKESILFH

SEQ ID NO: 10978 - protein, 24 aa, Artificial sequence
  synthetic peptide
FQEGLKIFFPGVSEFGKESILFHY

SEQ ID NO: 10979 - protein, 24 aa, Artificial sequence
  synthetic peptide
QEGLKIFFPGVSEFGKESILFHYT

SEQ ID NO: 10980 - protein, 24 aa, Artificial sequence
  synthetic peptide
EGLKIFFPGVSEFGKESILFHYTD

SEQ ID NO: 10981 - protein, 24 aa, Artificial sequence
  synthetic peptide
GLKIFFPGVSEFGKESILFHYTDW

SEQ ID NO: 10982 - protein, 24 aa, Artificial sequence
  synthetic peptide
LKIFFPGVSEFGKESILFHYTDWV

SEQ ID NO: 10983 - protein, 24 aa, Artificial sequence
  synthetic peptide
KIFFPGVSEFGKESILFHYTDWVD

SEQ ID NO: 10984 - protein, 24 aa, Artificial sequence
  synthetic peptide
IFFPGVSEFGKESILFHYTDWVDD

SEQ ID NO: 10985 - protein, 24 aa, Artificial sequence
  synthetic peptide
FFPGVSEFGKESILFHYTDWVDDQ

SEQ ID NO: 10986 - protein, 24 aa, Artificial sequence
  synthetic peptide
FPGVSEFGKESILFHYTDWVDDQR

SEQ ID NO: 10987 - protein, 24 aa, Artificial sequence
  synthetic peptide
PGVSEFGKESILFHYTDWVDDQRP

SEQ ID NO: 10988 - protein, 24 aa, Artificial sequence
  synthetic peptide
GVSEFGKESILFHYTDWVDDQRPE

SEQ ID NO: 10989 - protein, 24 aa, Artificial sequence
  synthetic peptide
VSEFGKESILFHYTDWVDDQRPEN

SEQ ID NO: 10990 - protein, 24 aa, Artificial sequence
  synthetic peptide
SEFGKESILFHYTDWVDDQRPENY

SEQ ID NO: 10991 - protein, 24 aa, Artificial sequence
  synthetic peptide
EFGKESILFHYTDWVDDQRPENYR

SEQ ID NO: 10992 - protein, 24 aa, Artificial sequence
  synthetic peptide
FGKESILFHYTDWVDDQRPENYRE

SEQ ID NO: 10993 - protein, 24 aa, Artificial sequence
  synthetic peptide
GKESILFHYTDWVDDQRPENYREA

SEQ ID NO: 10994 - protein, 24 aa, Artificial sequence
  synthetic peptide
KESILFHYTDWVDDQRPENYREAL

SEQ ID NO: 10995 - protein, 24 aa, Artificial sequence
  synthetic peptide
ESILFHYTDWVDDQRPENYREALG

SEQ ID NO: 10996 - protein, 24 aa, Artificial sequence
  synthetic peptide
SILFHYTDWVDDQRPENYREALGD

SEQ ID NO: 10997 - protein, 24 aa, Artificial sequence
  synthetic peptide
ILFHYTDWVDDQRPENYREALGDV

SEQ ID NO: 10998 - protein, 24 aa, Artificial sequence
  synthetic peptide
LFHYTDWVDDQRPENYREALGDVV

SEQ ID NO: 10999 - protein, 24 aa, Artificial sequence
  synthetic peptide
FHYTDWVDDQRPENYREALGDVVG

SEQ ID NO: 11000 - protein, 24 aa, Artificial sequence
  synthetic peptide
HYTDWVDDQRPENYREALGDVVGD

SEQ ID NO: 11001 - protein, 24 aa, Artificial sequence
  synthetic peptide
YTDWVDDQRPENYREALGDVVGDY

SEQ ID NO: 11002 - protein, 24 aa, Artificial sequence
  synthetic peptide
TDWVDDQRPENYREALGDVVGDYN

SEQ ID NO: 11003 - protein, 24 aa, Artificial sequence
  synthetic peptide
DWVDDQRPENYREALGDVVGDYNF

SEQ ID NO: 11004 - protein, 24 aa, Artificial sequence
  synthetic peptide
WVDDQRPENYREALGDVVGDYNFI

SEQ ID NO: 11005 - protein, 24 aa, Artificial sequence
  synthetic peptide
VDDQRPENYREALGDVVGDYNFIC

SEQ ID NO: 11006 - protein, 24 aa, Artificial sequence
  synthetic peptide
DDQRPENYREALGDVVGDYNFICP

SEQ ID NO: 11007 - protein, 24 aa, Artificial sequence
  synthetic peptide
DQRPENYREALGDVVGDYNFICPA

SEQ ID NO: 11008 - protein, 24 aa, Artificial sequence
  synthetic peptide
QRPENYREALGDVVGDYNFICPAL

SEQ ID NO: 11009 - protein, 24 aa, Artificial sequence
  synthetic peptide
RPENYREALGDVVGDYNFICPALE

SEQ ID NO: 11010 - protein, 24 aa, Artificial sequence
  synthetic peptide
PENYREALGDVVGDYNFICPALEF

SEQ ID NO: 11011 - protein, 24 aa, Artificial sequence
  synthetic peptide
ENYREALGDVVGDYNFICPALEFT

SEQ ID NO: 11012 - protein, 24 aa, Artificial sequence
  synthetic peptide
NYREALGDVVGDYNFICPALEFTK

SEQ ID NO: 11013 - protein, 24 aa, Artificial sequence
  synthetic peptide
YREALGDVVGDYNFICPALEFTKK

SEQ ID NO: 11014 - protein, 24 aa, Artificial sequence
  synthetic peptide
REALGDVVGDYNFICPALEFTKKF

SEQ ID NO: 11015 - protein, 24 aa, Artificial sequence
  synthetic peptide
EALGDVVGDYNFICPALEFTKKFS

SEQ ID NO: 11016 - protein, 24 aa, Artificial sequence
  synthetic peptide
ALGDVVGDYNFICPALEFTKKFSE

SEQ ID NO: 11017 - protein, 24 aa, Artificial sequence
  synthetic peptide
LGDVVGDYNFICPALEFTKKFSEW

SEQ ID NO: 11018 - protein, 24 aa, Artificial sequence
  synthetic peptide
GDVVGDYNFICPALEFTKKFSEWG

SEQ ID NO: 11019 - protein, 24 aa, Artificial sequence
  synthetic peptide
DVVGDYNFICPALEFTKKFSEWGN

SEQ ID NO: 11020 - protein, 24 aa, Artificial sequence
  synthetic peptide
VVGDYNFICPALEFTKKFSEWGNN

SEQ ID NO: 11021 - protein, 24 aa, Artificial sequence
  synthetic peptide
VGDYNFICPALEFTKKFSEWGNNA

SEQ ID NO: 11022 - protein, 24 aa, Artificial sequence
  synthetic peptide
GDYNFICPALEFTKKFSEWGNNAF

SEQ ID NO: 11023 - protein, 24 aa, Artificial sequence
  synthetic peptide
DYNFICPALEFTKKFSEWGNNAFF

SEQ ID NO: 11024 - protein, 24 aa, Artificial sequence
  synthetic peptide
YNFICPALEFTKKFSEWGNNAFFY

SEQ ID NO: 11025 - protein, 24 aa, Artificial sequence
  synthetic peptide
NFICPALEFTKKFSEWGNNAFFYY

SEQ ID NO: 11026 - protein, 24 aa, Artificial sequence
  synthetic peptide
FICPALEFTKKFSEWGNNAFFYYF

SEQ ID NO: 11027 - protein, 24 aa, Artificial sequence
  synthetic peptide
ICPALEFTKKFSEWGNNAFFYYFE

SEQ ID NO: 11028 - protein, 24 aa, Artificial sequence
  synthetic peptide
CPALEFTKKFSEWGNNAFFYYFEH

SEQ ID NO: 11029 - protein, 24 aa, Artificial sequence
  synthetic peptide
PALEFTKKFSEWGNNAFFYYFEHR

SEQ ID NO: 11030 - protein, 24 aa, Artificial sequence
  synthetic peptide
ALEFTKKFSEWGNNAFFYYFEHRS

SEQ ID NO: 11031 - protein, 24 aa, Artificial sequence
  synthetic peptide
LEFTKKFSEWGNNAFFYYFEHRSS

SEQ ID NO: 11032 - protein, 24 aa, Artificial sequence
  synthetic peptide
EFTKKFSEWGNNAFFYYFEHRSSK

SEQ ID NO: 11033 - protein, 24 aa, Artificial sequence
  synthetic peptide
FTKKFSEWGNNAFFYYFEHRSSKL

SEQ ID NO: 11034 - protein, 24 aa, Artificial sequence
  synthetic peptide
TKKFSEWGNNAFFYYFEHRSSKLP

SEQ ID NO: 11035 - protein, 24 aa, Artificial sequence
  synthetic peptide
KKFSEWGNNAFFYYFEHRSSKLPW

SEQ ID NO: 11036 - protein, 24 aa, Artificial sequence
  synthetic peptide
KFSEWGNNAFFYYFEHRSSKLPWP

SEQ ID NO: 11037 - protein, 24 aa, Artificial sequence
  synthetic peptide
FSEWGNNAFFYYFEHRSSKLPWPE

SEQ ID NO: 11038 - protein, 24 aa, Artificial sequence
  synthetic peptide
SEWGNNAFFYYFEHRSSKLPWPEW

SEQ ID NO: 11039 - protein, 24 aa, Artificial sequence
  synthetic peptide
EWGNNAFFYYFEHRSSKLPWPEWM

SEQ ID NO: 11040 - protein, 24 aa, Artificial sequence
  synthetic peptide
WGNNAFFYYFEHRSSKLPWPEWMG

SEQ ID NO: 11041 - protein, 24 aa, Artificial sequence
  synthetic peptide
GNNAFFYYFEHRSSKLPWPEWMGV

SEQ ID NO: 11042 - protein, 24 aa, Artificial sequence
  synthetic peptide
NNAFFYYFEHRSSKLPWPEWMGVM

SEQ ID NO: 11043 - protein, 24 aa, Artificial sequence
  synthetic peptide
NAFFYYFEHRSSKLPWPEWMGVMH

SEQ ID NO: 11044 - protein, 24 aa, Artificial sequence
  synthetic peptide
AFFYYFEHRSSKLPWPEWMGVMHG

SEQ ID NO: 11045 - protein, 24 aa, Artificial sequence
  synthetic peptide
FFYYFEHRSSKLPWPEWMGVMHGY

SEQ ID NO: 11046 - protein, 24 aa, Artificial sequence
  synthetic peptide
FYYFEHRSSKLPWPEWMGVMHGYE

SEQ ID NO: 11047 - protein, 24 aa, Artificial sequence
  synthetic peptide
YYFEHRSSKLPWPEWMGVMHGYEI

SEQ ID NO: 11048 - protein, 24 aa, Artificial sequence
  synthetic peptide
YFEHRSSKLPWPEWMGVMHGYEIE

SEQ ID NO: 11049 - protein, 24 aa, Artificial sequence
  synthetic peptide
FEHRSSKLPWPEWMGVMHGYEIEF

SEQ ID NO: 11050 - protein, 24 aa, Artificial sequence
  synthetic peptide
EHRSSKLPWPEWMGVMHGYEIEFV

SEQ ID NO: 11051 - protein, 24 aa, Artificial sequence
  synthetic peptide
HRSSKLPWPEWMGVMHGYEIEFVF

SEQ ID NO: 11052 - protein, 24 aa, Artificial sequence
  synthetic peptide
RSSKLPWPEWMGVMHGYEIEFVFG

SEQ ID NO: 11053 - protein, 24 aa, Artificial sequence
  synthetic peptide
SSKLPWPEWMGVMHGYEIEFVFGL

SEQ ID NO: 11054 - protein, 24 aa, Artificial sequence
  synthetic peptide
SKLPWPEWMGVMHGYEIEFVFGLP

SEQ ID NO: 11055 - protein, 24 aa, Artificial sequence
  synthetic peptide
KLPWPEWMGVMHGYEIEFVFGLPL

SEQ ID NO: 11056 - protein, 24 aa, Artificial sequence
  synthetic peptide
LPWPEWMGVMHGYEIEFVFGLPLE

SEQ ID NO: 11057 - protein, 24 aa, Artificial sequence
  synthetic peptide
PWPEWMGVMHGYEIEFVFGLPLER

SEQ ID NO: 11058 - protein, 24 aa, Artificial sequence
  synthetic peptide
WPEWMGVMHGYEIEFVFGLPLERR

SEQ ID NO: 11059 - protein, 24 aa, Artificial sequence
  synthetic peptide
PEWMGVMHGYEIEFVFGLPLERRD

SEQ ID NO: 11060 - protein, 24 aa, Artificial sequence
  synthetic peptide
EWMGVMHGYEIEFVFGLPLERRDN

SEQ ID NO: 11061 - protein, 24 aa, Artificial sequence
  synthetic peptide
WMGVMHGYEIEFVFGLPLERRDNY

SEQ ID NO: 11062 - protein, 24 aa, Artificial sequence
  synthetic peptide
MGVMHGYEIEFVFGLPLERRDNYT

SEQ ID NO: 11063 - protein, 24 aa, Artificial sequence
  synthetic peptide
GVMHGYEIEFVFGLPLERRDNYTK

SEQ ID NO: 11064 - protein, 24 aa, Artificial sequence
  synthetic peptide
VMHGYEIEFVFGLPLERRDNYTKA

SEQ ID NO: 11065 - protein, 24 aa, Artificial sequence
  synthetic peptide
MHGYEIEFVFGLPLERRDNYTKAE

SEQ ID NO: 11066 - protein, 24 aa, Artificial sequence
  synthetic peptide
HGYEIEFVFGLPLERRDNYTKAEE

SEQ ID NO: 11067 - protein, 24 aa, Artificial sequence
  synthetic peptide
GYEIEFVFGLPLERRDNYTKAEEI

SEQ ID NO: 11068 - protein, 24 aa, Artificial sequence
  synthetic peptide
YEIEFVFGLPLERRDNYTKAEEIL

SEQ ID NO: 11069 - protein, 24 aa, Artificial sequence
  synthetic peptide
EIEFVFGLPLERRDNYTKAEEILS

SEQ ID NO: 11070 - protein, 24 aa, Artificial sequence
  synthetic peptide
IEFVFGLPLERRDNYTKAEEILSR

SEQ ID NO: 11071 - protein, 24 aa, Artificial sequence
  synthetic peptide
EFVFGLPLERRDNYTKAEEILSRS

SEQ ID NO: 11072 - protein, 24 aa, Artificial sequence
  synthetic peptide
FVFGLPLERRDNYTKAEEILSRSI

SEQ ID NO: 11073 - protein, 24 aa, Artificial sequence
  synthetic peptide
VFGLPLERRDNYTKAEEILSRSIV

SEQ ID NO: 11074 - protein, 24 aa, Artificial sequence
  synthetic peptide
FGLPLERRDNYTKAEEILSRSIVK

SEQ ID NO: 11075 - protein, 24 aa, Artificial sequence
  synthetic peptide
GLPLERRDNYTKAEEILSRSIVKR

SEQ ID NO: 11076 - protein, 24 aa, Artificial sequence
  synthetic peptide
LPLERRDNYTKAEEILSRSIVKRW

SEQ ID NO: 11077 - protein, 24 aa, Artificial sequence
  synthetic peptide
PLERRDNYTKAEEILSRSIVKRWA

SEQ ID NO: 11078 - protein, 24 aa, Artificial sequence
  synthetic peptide
LERRDNYTKAEEILSRSIVKRWAN

SEQ ID NO: 11079 - protein, 24 aa, Artificial sequence
  synthetic peptide
ERRDNYTKAEEILSRSIVKRWANF

SEQ ID NO: 11080 - protein, 24 aa, Artificial sequence
  synthetic peptide
RRDNYTKAEEILSRSIVKRWANFA

SEQ ID NO: 11081 - protein, 24 aa, Artificial sequence
  synthetic peptide
RDNYTKAEEILSRSIVKRWANFAK

SEQ ID NO: 11082 - protein, 24 aa, Artificial sequence
  synthetic peptide
DNYTKAEEILSRSIVKRWANFAKY

SEQ ID NO: 11083 - protein, 24 aa, Artificial sequence
  synthetic peptide
NYTKAEEILSRSIVKRWANFAKYG

SEQ ID NO: 11084 - protein, 24 aa, Artificial sequence
  synthetic peptide
YTKAEEILSRSIVKRWANFAKYGN

SEQ ID NO: 11085 - protein, 24 aa, Artificial sequence
  synthetic peptide
TKAEEILSRSIVKRWANFAKYGNP

SEQ ID NO: 11086 - protein, 24 aa, Artificial sequence
  synthetic peptide
KAEEILSRSIVKRWANFAKYGNPN

SEQ ID NO: 11087 - protein, 24 aa, Artificial sequence
  synthetic peptide
AEEILSRSIVKRWANFAKYGNPNE

SEQ ID NO: 11088 - protein, 24 aa, Artificial sequence
  synthetic peptide
EEILSRSIVKRWANFAKYGNPNET

SEQ ID NO: 11089 - protein, 24 aa, Artificial sequence
  synthetic peptide
EILSRSIVKRWANFAKYGNPNETQ

SEQ ID NO: 11090 - protein, 24 aa, Artificial sequence
  synthetic peptide
ILSRSIVKRWANFAKYGNPNETQN

SEQ ID NO: 11091 - protein, 24 aa, Artificial sequence
  synthetic peptide
LSRSIVKRWANFAKYGNPNETQNN

SEQ ID NO: 11092 - protein, 24 aa, Artificial sequence
  synthetic peptide
SRSIVKRWANFAKYGNPNETQNNS

SEQ ID NO: 11093 - protein, 24 aa, Artificial sequence
  synthetic peptide
RSIVKRWANFAKYGNPNETQNNST

SEQ ID NO: 11094 - protein, 24 aa, Artificial sequence
  synthetic peptide
SIVKRWANFAKYGNPNETQNNSTS

SEQ ID NO: 11095 - protein, 24 aa, Artificial sequence
  synthetic peptide
IVKRWANFAKYGNPNETQNNSTSW

SEQ ID NO: 11096 - protein, 24 aa, Artificial sequence
  synthetic peptide
VKRWANFAKYGNPNETQNNSTSWP

SEQ ID NO: 11097 - protein, 24 aa, Artificial sequence
  synthetic peptide
KRWANFAKYGNPNETQNNSTSWPV

SEQ ID NO: 11098 - protein, 24 aa, Artificial sequence
  synthetic peptide
RWANFAKYGNPNETQNNSTSWPVF

SEQ ID NO: 11099 - protein, 24 aa, Artificial sequence
  synthetic peptide
WANFAKYGNPNETQNNSTSWPVFK

SEQ ID NO: 11100 - protein, 24 aa, Artificial sequence
  synthetic peptide
ANFAKYGNPNETQNNSTSWPVFKS

SEQ ID NO: 11101 - protein, 24 aa, Artificial sequence
  synthetic peptide
NFAKYGNPNETQNNSTSWPVFKST

SEQ ID NO: 11102 - protein, 24 aa, Artificial sequence
  synthetic peptide
FAKYGNPNETQNNSTSWPVFKSTE

SEQ ID NO: 11103 - protein, 24 aa, Artificial sequence
  synthetic peptide
AKYGNPNETQNNSTSWPVFKSTEQ

SEQ ID NO: 11104 - protein, 24 aa, Artificial sequence
  synthetic peptide
KYGNPNETQNNSTSWPVFKSTEQK

SEQ ID NO: 11105 - protein, 24 aa, Artificial sequence
  synthetic peptide
YGNPNETQNNSTSWPVFKSTEQKY

SEQ ID NO: 11106 - protein, 24 aa, Artificial sequence
  synthetic peptide
GNPNETQNNSTSWPVFKSTEQKYL

SEQ ID NO: 11107 - protein, 24 aa, Artificial sequence
  synthetic peptide
NPNETQNNSTSWPVFKSTEQKYLT

SEQ ID NO: 11108 - protein, 24 aa, Artificial sequence
  synthetic peptide
PNETQNNSTSWPVFKSTEQKYLTL

SEQ ID NO: 11109 - protein, 24 aa, Artificial sequence
  synthetic peptide
NETQNNSTSWPVFKSTEQKYLTLN

SEQ ID NO: 11110 - protein, 24 aa, Artificial sequence
  synthetic peptide
ETQNNSTSWPVFKSTEQKYLTLNT

SEQ ID NO: 11111 - protein, 24 aa, Artificial sequence
  synthetic peptide
TQNNSTSWPVFKSTEQKYLTLNTE

SEQ ID NO: 11112 - protein, 24 aa, Artificial sequence
  synthetic peptide
QNNSTSWPVFKSTEQKYLTLNTES

SEQ ID NO: 11113 - protein, 24 aa, Artificial sequence
  synthetic peptide
NNSTSWPVFKSTEQKYLTLNTEST

SEQ ID NO: 11114 - protein, 24 aa, Artificial sequence
  synthetic peptide
NSTSWPVFKSTEQKYLTLNTESTR

SEQ ID NO: 11115 - protein, 24 aa, Artificial sequence
  synthetic peptide
STSWPVFKSTEQKYLTLNTESTRI

SEQ ID NO: 11116 - protein, 24 aa, Artificial sequence
  synthetic peptide
TSWPVFKSTEQKYLTLNTESTRIM

SEQ ID NO: 11117 - protein, 24 aa, Artificial sequence
  synthetic peptide
SWPVFKSTEQKYLTLNTESTRIMT

SEQ ID NO: 11118 - protein, 24 aa, Artificial sequence
  synthetic peptide
WPVFKSTEQKYLTLNTESTRIMTK

SEQ ID NO: 11119 - protein, 24 aa, Artificial sequence
  synthetic peptide
PVFKSTEQKYLTLNTESTRIMTKL

SEQ ID NO: 11120 - protein, 24 aa, Artificial sequence
  synthetic peptide
VFKSTEQKYLTLNTESTRIMTKLR

SEQ ID NO: 11121 - protein, 24 aa, Artificial sequence
  synthetic peptide
FKSTEQKYLTLNTESTRIMTKLRA

SEQ ID NO: 11122 - protein, 24 aa, Artificial sequence
  synthetic peptide
KSTEQKYLTLNTESTRIMTKLRAQ

SEQ ID NO: 11123 - protein, 24 aa, Artificial sequence
  synthetic peptide
STEQKYLTLNTESTRIMTKLRAQQ

SEQ ID NO: 11124 - protein, 24 aa, Artificial sequence
  synthetic peptide
TEQKYLTLNTESTRIMTKLRAQQC

SEQ ID NO: 11125 - protein, 24 aa, Artificial sequence
  synthetic peptide
EQKYLTLNTESTRIMTKLRAQQCR

SEQ ID NO: 11126 - protein, 24 aa, Artificial sequence
  synthetic peptide
QKYLTLNTESTRIMTKLRAQQCRF

SEQ ID NO: 11127 - protein, 24 aa, Artificial sequence
  synthetic peptide
KYLTLNTESTRIMTKLRAQQCRFW

SEQ ID NO: 11128 - protein, 24 aa, Artificial sequence
  synthetic peptide
YLTLNTESTRIMTKLRAQQCRFWT

SEQ ID NO: 11129 - protein, 24 aa, Artificial sequence
  synthetic peptide
LTLNTESTRIMTKLRAQQCRFWTS

SEQ ID NO: 11130 - protein, 24 aa, Artificial sequence
  synthetic peptide
TLNTESTRIMTKLRAQQCRFWTSF

SEQ ID NO: 11131 - protein, 24 aa, Artificial sequence
  synthetic peptide
LNTESTRIMTKLRAQQCRFWTSFF

SEQ ID NO: 11132 - protein, 24 aa, Artificial sequence
  synthetic peptide
NTESTRIMTKLRAQQCRFWTSFFP

SEQ ID NO: 11133 - protein, 24 aa, Artificial sequence
  synthetic peptide
TESTRIMTKLRAQQCRFWTSFFPK

SEQ ID NO: 11134 - protein, 24 aa, Artificial sequence
  synthetic peptide
ESTRIMTKLRAQQCRFWTSFFPKV

SEQ ID NO: 11135 - protein, 24 aa, Artificial sequence
  synthetic peptide
STRIMTKLRAQQCRFWTSFFPKVL

SEQ ID NO: 11136 - protein, 24 aa, Artificial sequence
  synthetic peptide
TRIMTKLRAQQCRFWTSFFPKVLE

SEQ ID NO: 11137 - protein, 24 aa, Artificial sequence
  synthetic peptide
RIMTKLRAQQCRFWTSFFPKVLEM

SEQ ID NO: 11138 - protein, 24 aa, Artificial sequence
  synthetic peptide
IMTKLRAQQCRFWTSFFPKVLEMT

SEQ ID NO: 11139 - protein, 24 aa, Artificial sequence
  synthetic peptide
MTKLRAQQCRFWTSFFPKVLEMTG

SEQ ID NO: 11140 - protein, 24 aa, Artificial sequence
  synthetic peptide
TKLRAQQCRFWTSFFPKVLEMTGN

SEQ ID NO: 11141 - protein, 24 aa, Artificial sequence
  synthetic peptide
KLRAQQCRFWTSFFPKVLEMTGNI

SEQ ID NO: 11142 - protein, 24 aa, Artificial sequence
  synthetic peptide
LRAQQCRFWTSFFPKVLEMTGNID

SEQ ID NO: 11143 - protein, 24 aa, Artificial sequence
  synthetic peptide
RAQQCRFWTSFFPKVLEMTGNIDE

SEQ ID NO: 11144 - protein, 24 aa, Artificial sequence
  synthetic peptide
AQQCRFWTSFFPKVLEMTGNIDEA

SEQ ID NO: 11145 - protein, 24 aa, Artificial sequence
  synthetic peptide
QQCRFWTSFFPKVLEMTGNIDEAE

SEQ ID NO: 11146 - protein, 24 aa, Artificial sequence
  synthetic peptide
QCRFWTSFFPKVLEMTGNIDEAEW

SEQ ID NO: 11147 - protein, 24 aa, Artificial sequence
  synthetic peptide
CRFWTSFFPKVLEMTGNIDEAEWE

SEQ ID NO: 11148 - protein, 24 aa, Artificial sequence
  synthetic peptide
RFWTSFFPKVLEMTGNIDEAEWEW

SEQ ID NO: 11149 - protein, 24 aa, Artificial sequence
  synthetic peptide
FWTSFFPKVLEMTGNIDEAEWEWK

SEQ ID NO: 11150 - protein, 24 aa, Artificial sequence
  synthetic peptide
WTSFFPKVLEMTGNIDEAEWEWKA

SEQ ID NO: 11151 - protein, 24 aa, Artificial sequence
  synthetic peptide
TSFFPKVLEMTGNIDEAEWEWKAG

SEQ ID NO: 11152 - protein, 24 aa, Artificial sequence
  synthetic peptide
SFFPKVLEMTGNIDEAEWEWKAGF

SEQ ID NO: 11153 - protein, 24 aa, Artificial sequence
  synthetic peptide
FFPKVLEMTGNIDEAEWEWKAGFH

SEQ ID NO: 11154 - protein, 24 aa, Artificial sequence
  synthetic peptide
FPKVLEMTGNIDEAEWEWKAGFHR

SEQ ID NO: 11155 - protein, 24 aa, Artificial sequence
  synthetic peptide
PKVLEMTGNIDEAEWEWKAGFHRW

SEQ ID NO: 11156 - protein, 24 aa, Artificial sequence
  synthetic peptide
KVLEMTGNIDEAEWEWKAGFHRWN

SEQ ID NO: 11157 - protein, 24 aa, Artificial sequence
  synthetic peptide
VLEMTGNIDEAEWEWKAGFHRWNN

SEQ ID NO: 11158 - protein, 24 aa, Artificial sequence
  synthetic peptide
LEMTGNIDEAEWEWKAGFHRWNNY

SEQ ID NO: 11159 - protein, 24 aa, Artificial sequence
  synthetic peptide
EMTGNIDEAEWEWKAGFHRWNNYM

SEQ ID NO: 11160 - protein, 24 aa, Artificial sequence
  synthetic peptide
MTGNIDEAEWEWKAGFHRWNNYMM

SEQ ID NO: 11161 - protein, 24 aa, Artificial sequence
  synthetic peptide
TGNIDEAEWEWKAGFHRWNNYMMD

SEQ ID NO: 11162 - protein, 24 aa, Artificial sequence
  synthetic peptide
GNIDEAEWEWKAGFHRWNNYMMDW

SEQ ID NO: 11163 - protein, 24 aa, Artificial sequence
  synthetic peptide
NIDEAEWEWKAGFHRWNNYMMDWK

SEQ ID NO: 11164 - protein, 24 aa, Artificial sequence
  synthetic peptide
IDEAEWEWKAGFHRWNNYMMDWKN

SEQ ID NO: 11165 - protein, 24 aa, Artificial sequence
  synthetic peptide
DEAEWEWKAGFHRWNNYMMDWKNQ

SEQ ID NO: 11166 - protein, 24 aa, Artificial sequence
  synthetic peptide
EAEWEWKAGFHRWNNYMMDWKNQF

SEQ ID NO: 11167 - protein, 24 aa, Artificial sequence
  synthetic peptide
AEWEWKAGFHRWNNYMMDWKNQFN

SEQ ID NO: 11168 - protein, 24 aa, Artificial sequence
  synthetic peptide
EWEWKAGFHRWNNYMMDWKNQFND

SEQ ID NO: 11169 - protein, 24 aa, Artificial sequence
  synthetic peptide
WEWKAGFHRWNNYMMDWKNQFNDY

SEQ ID NO: 11170 - protein, 24 aa, Artificial sequence
  synthetic peptide
EWKAGFHRWNNYMMDWKNQFNDYT

SEQ ID NO: 11171 - protein, 24 aa, Artificial sequence
  synthetic peptide
WKAGFHRWNNYMMDWKNQFNDYTS

SEQ ID NO: 11172 - protein, 24 aa, Artificial sequence
  synthetic peptide
KAGFHRWNNYMMDWKNQFNDYTSK

SEQ ID NO: 11173 - protein, 24 aa, Artificial sequence
  synthetic peptide
AGFHRWNNYMMDWKNQFNDYTSKK

SEQ ID NO: 11174 - protein, 24 aa, Artificial sequence
  synthetic peptide
GFHRWNNYMMDWKNQFNDYTSKKE

SEQ ID NO: 11175 - protein, 24 aa, Artificial sequence
  synthetic peptide
FHRWNNYMMDWKNQFNDYTSKKES

SEQ ID NO: 11176 - protein, 24 aa, Artificial sequence
  synthetic peptide
HRWNNYMMDWKNQFNDYTSKKESC

SEQ ID NO: 11177 - protein, 24 aa, Artificial sequence
  synthetic peptide
RWNNYMMDWKNQFNDYTSKKESCV

SEQ ID NO: 11178 - protein, 24 aa, Artificial sequence
  synthetic peptide
WNNYMMDWKNQFNDYTSKKESCVG

SEQ ID NO: 11179 - protein, 24 aa, Artificial sequence
  synthetic peptide
NNYMMDWKNQFNDYTSKKESCVGL

SEQ ID NO: 11180 - protein, 25 aa, Artificial sequence
  synthetic peptide
MHSKVTIICIRFLFWFLLLCMLIGK

SEQ ID NO: 11181 - protein, 25 aa, Artificial sequence
  synthetic peptide
HSKVTIICIRFLFWFLLLCMLIGKS

SEQ ID NO: 11182 - protein, 25 aa, Artificial sequence
  synthetic peptide
SKVTIICIRFLFWFLLLCMLIGKSH

SEQ ID NO: 11183 - protein, 25 aa, Artificial sequence
  synthetic peptide
KVTIICIRFLFWFLLLCMLIGKSHT

SEQ ID NO: 11184 - protein, 25 aa, Artificial sequence
  synthetic peptide
VTIICIRFLFWFLLLCMLIGKSHTE

SEQ ID NO: 11185 - protein, 25 aa, Artificial sequence
  synthetic peptide
TIICIRFLFWFLLLCMLIGKSHTED

SEQ ID NO: 11186 - protein, 25 aa, Artificial sequence
  synthetic peptide
IICIRFLFWFLLLCMLIGKSHTEDD

SEQ ID NO: 11187 - protein, 25 aa, Artificial sequence
  synthetic peptide
ICIRFLFWFLLLCMLIGKSHTEDDI

SEQ ID NO: 11188 - protein, 25 aa, Artificial sequence
  synthetic peptide
CIRFLFWFLLLCMLIGKSHTEDDII

SEQ ID NO: 11189 - protein, 25 aa, Artificial sequence
  synthetic peptide
IRFLFWFLLLCMLIGKSHTEDDIII

SEQ ID NO: 11190 - protein, 25 aa, Artificial sequence
  synthetic peptide
RFLFWFLLLCMLIGKSHTEDDIIIA

SEQ ID NO: 11191 - protein, 25 aa, Artificial sequence
  synthetic peptide
FLFWFLLLCMLIGKSHTEDDIIIAT

SEQ ID NO: 11192 - protein, 25 aa, Artificial sequence
  synthetic peptide
LFWFLLLCMLIGKSHTEDDIIIATK

SEQ ID NO: 11193 - protein, 25 aa, Artificial sequence
  synthetic peptide
FWFLLLCMLIGKSHTEDDIIIATKN

SEQ ID NO: 11194 - protein, 25 aa, Artificial sequence
  synthetic peptide
WFLLLCMLIGKSHTEDDIIIATKNG

SEQ ID NO: 11195 - protein, 25 aa, Artificial sequence
  synthetic peptide
FLLLCMLIGKSHTEDDIIIATKNGK

SEQ ID NO: 11196 - protein, 25 aa, Artificial sequence
  synthetic peptide
LLLCMLIGKSHTEDDIIIATKNGKV

SEQ ID NO: 11197 - protein, 25 aa, Artificial sequence
  synthetic peptide
LLCMLIGKSHTEDDIIIATKNGKVR

SEQ ID NO: 11198 - protein, 25 aa, Artificial sequence
  synthetic peptide
LCMLIGKSHTEDDIIIATKNGKVRG

SEQ ID NO: 11199 - protein, 25 aa, Artificial sequence
  synthetic peptide
CMLIGKSHTEDDIIIATKNGKVRGM

SEQ ID NO: 11200 - protein, 25 aa, Artificial sequence
  synthetic peptide
MLIGKSHTEDDIIIATKNGKVRGMN

SEQ ID NO: 11201 - protein, 25 aa, Artificial sequence
  synthetic peptide
LIGKSHTEDDIIIATKNGKVRGMNL

SEQ ID NO: 11202 - protein, 25 aa, Artificial sequence
  synthetic peptide
IGKSHTEDDIIIATKNGKVRGMNLT

SEQ ID NO: 11203 - protein, 25 aa, Artificial sequence
  synthetic peptide
GKSHTEDDIIIATKNGKVRGMNLTV

SEQ ID NO: 11204 - protein, 25 aa, Artificial sequence
  synthetic peptide
KSHTEDDIIIATKNGKVRGMNLTVF

SEQ ID NO: 11205 - protein, 25 aa, Artificial sequence
  synthetic peptide
SHTEDDIIIATKNGKVRGMNLTVFG

SEQ ID NO: 11206 - protein, 25 aa, Artificial sequence
  synthetic peptide
HTEDDIIIATKNGKVRGMNLTVFGG

SEQ ID NO: 11207 - protein, 25 aa, Artificial sequence
  synthetic peptide
TEDDIIIATKNGKVRGMNLTVFGGT

SEQ ID NO: 11208 - protein, 25 aa, Artificial sequence
  synthetic peptide
EDDIIIATKNGKVRGMNLTVFGGTV

SEQ ID NO: 11209 - protein, 25 aa, Artificial sequence
  synthetic peptide
DDIIIATKNGKVRGMNLTVFGGTVT

SEQ ID NO: 11210 - protein, 25 aa, Artificial sequence
  synthetic peptide
DIIIATKNGKVRGMNLTVFGGTVTA

SEQ ID NO: 11211 - protein, 25 aa, Artificial sequence
  synthetic peptide
IIIATKNGKVRGMNLTVFGGTVTAF

SEQ ID NO: 11212 - protein, 25 aa, Artificial sequence
  synthetic peptide
IIATKNGKVRGMNLTVFGGTVTAFL

SEQ ID NO: 11213 - protein, 25 aa, Artificial sequence
  synthetic peptide
IATKNGKVRGMNLTVFGGTVTAFLG

SEQ ID NO: 11214 - protein, 25 aa, Artificial sequence
  synthetic peptide
ATKNGKVRGMNLTVFGGTVTAFLGI

SEQ ID NO: 11215 - protein, 25 aa, Artificial sequence
  synthetic peptide
TKNGKVRGMNLTVFGGTVTAFLGIP

SEQ ID NO: 11216 - protein, 25 aa, Artificial sequence
  synthetic peptide
KNGKVRGMNLTVFGGTVTAFLGIPY

SEQ ID NO: 11217 - protein, 25 aa, Artificial sequence
  synthetic peptide
NGKVRGMNLTVFGGTVTAFLGIPYA

SEQ ID NO: 11218 - protein, 25 aa, Artificial sequence
  synthetic peptide
GKVRGMNLTVFGGTVTAFLGIPYAQ

SEQ ID NO: 11219 - protein, 25 aa, Artificial sequence
  synthetic peptide
KVRGMNLTVFGGTVTAFLGIPYAQP

SEQ ID NO: 11220 - protein, 25 aa, Artificial sequence
  synthetic peptide
VRGMNLTVFGGTVTAFLGIPYAQPP

SEQ ID NO: 11221 - protein, 25 aa, Artificial sequence
  synthetic peptide
RGMNLTVFGGTVTAFLGIPYAQPPL

SEQ ID NO: 11222 - protein, 25 aa, Artificial sequence
  synthetic peptide
GMNLTVFGGTVTAFLGIPYAQPPLG

SEQ ID NO: 11223 - protein, 25 aa, Artificial sequence
  synthetic peptide
MNLTVFGGTVTAFLGIPYAQPPLGR

SEQ ID NO: 11224 - protein, 25 aa, Artificial sequence
  synthetic peptide
NLTVFGGTVTAFLGIPYAQPPLGRL

SEQ ID NO: 11225 - protein, 25 aa, Artificial sequence
  synthetic peptide
LTVFGGTVTAFLGIPYAQPPLGRLR

SEQ ID NO: 11226 - protein, 25 aa, Artificial sequence
  synthetic peptide
TVFGGTVTAFLGIPYAQPPLGRLRF

SEQ ID NO: 11227 - protein, 25 aa, Artificial sequence
  synthetic peptide
VFGGTVTAFLGIPYAQPPLGRLRFK

SEQ ID NO: 11228 - protein, 25 aa, Artificial sequence
  synthetic peptide
FGGTVTAFLGIPYAQPPLGRLRFKK

SEQ ID NO: 11229 - protein, 25 aa, Artificial sequence
  synthetic peptide
GGTVTAFLGIPYAQPPLGRLRFKKP

SEQ ID NO: 11230 - protein, 25 aa, Artificial sequence
  synthetic peptide
GTVTAFLGIPYAQPPLGRLRFKKPQ

SEQ ID NO: 11231 - protein, 25 aa, Artificial sequence
  synthetic peptide
TVTAFLGIPYAQPPLGRLRFKKPQS

SEQ ID NO: 11232 - protein, 25 aa, Artificial sequence
  synthetic peptide
VTAFLGIPYAQPPLGRLRFKKPQSL

SEQ ID NO: 11233 - protein, 25 aa, Artificial sequence
  synthetic peptide
TAFLGIPYAQPPLGRLRFKKPQSLT

SEQ ID NO: 11234 - protein, 25 aa, Artificial sequence
  synthetic peptide
AFLGIPYAQPPLGRLRFKKPQSLTK

SEQ ID NO: 11235 - protein, 25 aa, Artificial sequence
  synthetic peptide
FLGIPYAQPPLGRLRFKKPQSLTKW

SEQ ID NO: 11236 - protein, 25 aa, Artificial sequence
  synthetic peptide
LGIPYAQPPLGRLRFKKPQSLTKWS

SEQ ID NO: 11237 - protein, 25 aa, Artificial sequence
  synthetic peptide
GIPYAQPPLGRLRFKKPQSLTKWSD

SEQ ID NO: 11238 - protein, 25 aa, Artificial sequence
  synthetic peptide
IPYAQPPLGRLRFKKPQSLTKWSDI

SEQ ID NO: 11239 - protein, 25 aa, Artificial sequence
  synthetic peptide
PYAQPPLGRLRFKKPQSLTKWSDIW

SEQ ID NO: 11240 - protein, 25 aa, Artificial sequence
  synthetic peptide
YAQPPLGRLRFKKPQSLTKWSDIWN

SEQ ID NO: 11241 - protein, 25 aa, Artificial sequence
  synthetic peptide
AQPPLGRLRFKKPQSLTKWSDIWNA

SEQ ID NO: 11242 - protein, 25 aa, Artificial sequence
  synthetic peptide
QPPLGRLRFKKPQSLTKWSDIWNAT

SEQ ID NO: 11243 - protein, 25 aa, Artificial sequence
  synthetic peptide
PPLGRLRFKKPQSLTKWSDIWNATK

SEQ ID NO: 11244 - protein, 25 aa, Artificial sequence
  synthetic peptide
PLGRLRFKKPQSLTKWSDIWNATKY

SEQ ID NO: 11245 - protein, 25 aa, Artificial sequence
  synthetic peptide
LGRLRFKKPQSLTKWSDIWNATKYA

SEQ ID NO: 11246 - protein, 25 aa, Artificial sequence
  synthetic peptide
GRLRFKKPQSLTKWSDIWNATKYAN

SEQ ID NO: 11247 - protein, 25 aa, Artificial sequence
  synthetic peptide
RLRFKKPQSLTKWSDIWNATKYANS

SEQ ID NO: 11248 - protein, 25 aa, Artificial sequence
  synthetic peptide
LRFKKPQSLTKWSDIWNATKYANSC

SEQ ID NO: 11249 - protein, 25 aa, Artificial sequence
  synthetic peptide
RFKKPQSLTKWSDIWNATKYANSCC

SEQ ID NO: 11250 - protein, 25 aa, Artificial sequence
  synthetic peptide
FKKPQSLTKWSDIWNATKYANSCCQ

SEQ ID NO: 11251 - protein, 25 aa, Artificial sequence
  synthetic peptide
KKPQSLTKWSDIWNATKYANSCCQN

SEQ ID NO: 11252 - protein, 25 aa, Artificial sequence
  synthetic peptide
KPQSLTKWSDIWNATKYANSCCQNI

SEQ ID NO: 11253 - protein, 25 aa, Artificial sequence
  synthetic peptide
PQSLTKWSDIWNATKYANSCCQNID

SEQ ID NO: 11254 - protein, 25 aa, Artificial sequence
  synthetic peptide
QSLTKWSDIWNATKYANSCCQNIDQ

SEQ ID NO: 11255 - protein, 25 aa, Artificial sequence
  synthetic peptide
SLTKWSDIWNATKYANSCCQNIDQS

SEQ ID NO: 11256 - protein, 25 aa, Artificial sequence
  synthetic peptide
LTKWSDIWNATKYANSCCQNIDQSF

SEQ ID NO: 11257 - protein, 25 aa, Artificial sequence
  synthetic peptide
TKWSDIWNATKYANSCCQNIDQSFP

SEQ ID NO: 11258 - protein, 25 aa, Artificial sequence
  synthetic peptide
KWSDIWNATKYANSCCQNIDQSFPG

SEQ ID NO: 11259 - protein, 25 aa, Artificial sequence
  synthetic peptide
WSDIWNATKYANSCCQNIDQSFPGF

SEQ ID NO: 11260 - protein, 25 aa, Artificial sequence
  synthetic peptide
SDIWNATKYANSCCQNIDQSFPGFH

SEQ ID NO: 11261 - protein, 25 aa, Artificial sequence
  synthetic peptide
DIWNATKYANSCCQNIDQSFPGFHG

SEQ ID NO: 11262 - protein, 25 aa, Artificial sequence
  synthetic peptide
IWNATKYANSCCQNIDQSFPGFHGS

SEQ ID NO: 11263 - protein, 25 aa, Artificial sequence
  synthetic peptide
WNATKYANSCCQNIDQSFPGFHGSE

SEQ ID NO: 11264 - protein, 25 aa, Artificial sequence
  synthetic peptide
NATKYANSCCQNIDQSFPGFHGSEM

SEQ ID NO: 11265 - protein, 25 aa, Artificial sequence
  synthetic peptide
ATKYANSCCQNIDQSFPGFHGSEMW

SEQ ID NO: 11266 - protein, 25 aa, Artificial sequence
  synthetic peptide
TKYANSCCQNIDQSFPGFHGSEMWN

SEQ ID NO: 11267 - protein, 25 aa, Artificial sequence
  synthetic peptide
KYANSCCQNIDQSFPGFHGSEMWNP

SEQ ID NO: 11268 - protein, 25 aa, Artificial sequence
  synthetic peptide
YANSCCQNIDQSFPGFHGSEMWNPN

SEQ ID NO: 11269 - protein, 25 aa, Artificial sequence
  synthetic peptide
ANSCCQNIDQSFPGFHGSEMWNPNT

SEQ ID NO: 11270 - protein, 25 aa, Artificial sequence
  synthetic peptide
NSCCQNIDQSFPGFHGSEMWNPNTD

SEQ ID NO: 11271 - protein, 25 aa, Artificial sequence
  synthetic peptide
SCCQNIDQSFPGFHGSEMWNPNTDL

SEQ ID NO: 11272 - protein, 25 aa, Artificial sequence
  synthetic peptide
CCQNIDQSFPGFHGSEMWNPNTDLS

SEQ ID NO: 11273 - protein, 25 aa, Artificial sequence
  synthetic peptide
CQNIDQSFPGFHGSEMWNPNTDLSE

SEQ ID NO: 11274 - protein, 25 aa, Artificial sequence
  synthetic peptide
QNIDQSFPGFHGSEMWNPNTDLSED

SEQ ID NO: 11275 - protein, 25 aa, Artificial sequence
  synthetic peptide
NIDQSFPGFHGSEMWNPNTDLSEDC

SEQ ID NO: 11276 - protein, 25 aa, Artificial sequence
  synthetic peptide
IDQSFPGFHGSEMWNPNTDLSEDCL

SEQ ID NO: 11277 - protein, 25 aa, Artificial sequence
  synthetic peptide
DQSFPGFHGSEMWNPNTDLSEDCLY

SEQ ID NO: 11278 - protein, 25 aa, Artificial sequence
  synthetic peptide
QSFPGFHGSEMWNPNTDLSEDCLYL

SEQ ID NO: 11279 - protein, 25 aa, Artificial sequence
  synthetic peptide
SFPGFHGSEMWNPNTDLSEDCLYLN

SEQ ID NO: 11280 - protein, 25 aa, Artificial sequence
  synthetic peptide
FPGFHGSEMWNPNTDLSEDCLYLNV

SEQ ID NO: 11281 - protein, 25 aa, Artificial sequence
  synthetic peptide
PGFHGSEMWNPNTDLSEDCLYLNVW

SEQ ID NO: 11282 - protein, 25 aa, Artificial sequence
  synthetic peptide
GFHGSEMWNPNTDLSEDCLYLNVWI

SEQ ID NO: 11283 - protein, 25 aa, Artificial sequence
  synthetic peptide
FHGSEMWNPNTDLSEDCLYLNVWIP

SEQ ID NO: 11284 - protein, 25 aa, Artificial sequence
  synthetic peptide
HGSEMWNPNTDLSEDCLYLNVWIPA

SEQ ID NO: 11285 - protein, 25 aa, Artificial sequence
  synthetic peptide
GSEMWNPNTDLSEDCLYLNVWIPAP

SEQ ID NO: 11286 - protein, 25 aa, Artificial sequence
  synthetic peptide
SEMWNPNTDLSEDCLYLNVWIPAPK

SEQ ID NO: 11287 - protein, 25 aa, Artificial sequence
  synthetic peptide
EMWNPNTDLSEDCLYLNVWIPAPKP

SEQ ID NO: 11288 - protein, 25 aa, Artificial sequence
  synthetic peptide
MWNPNTDLSEDCLYLNVWIPAPKPK

SEQ ID NO: 11289 - protein, 25 aa, Artificial sequence
  synthetic peptide
WNPNTDLSEDCLYLNVWIPAPKPKN

SEQ ID NO: 11290 - protein, 25 aa, Artificial sequence
  synthetic peptide
NPNTDLSEDCLYLNVWIPAPKPKNA

SEQ ID NO: 11291 - protein, 25 aa, Artificial sequence
  synthetic peptide
PNTDLSEDCLYLNVWIPAPKPKNAT

SEQ ID NO: 11292 - protein, 25 aa, Artificial sequence
  synthetic peptide
NTDLSEDCLYLNVWIPAPKPKNATV

SEQ ID NO: 11293 - protein, 25 aa, Artificial sequence
  synthetic peptide
TDLSEDCLYLNVWIPAPKPKNATVL

SEQ ID NO: 11294 - protein, 25 aa, Artificial sequence
  synthetic peptide
DLSEDCLYLNVWIPAPKPKNATVLI

SEQ ID NO: 11295 - protein, 25 aa, Artificial sequence
  synthetic peptide
LSEDCLYLNVWIPAPKPKNATVLIW

SEQ ID NO: 11296 - protein, 25 aa, Artificial sequence
  synthetic peptide
SEDCLYLNVWIPAPKPKNATVLIWI

SEQ ID NO: 11297 - protein, 25 aa, Artificial sequence
  synthetic peptide
EDCLYLNVWIPAPKPKNATVLIWIY

SEQ ID NO: 11298 - protein, 25 aa, Artificial sequence
  synthetic peptide
DCLYLNVWIPAPKPKNATVLIWIYG

SEQ ID NO: 11299 - protein, 25 aa, Artificial sequence
  synthetic peptide
CLYLNVWIPAPKPKNATVLIWIYGG

SEQ ID NO: 11300 - protein, 25 aa, Artificial sequence
  synthetic peptide
LYLNVWIPAPKPKNATVLIWIYGGG

SEQ ID NO: 11301 - protein, 25 aa, Artificial sequence
  synthetic peptide
YLNVWIPAPKPKNATVLIWIYGGGF

SEQ ID NO: 11302 - protein, 25 aa, Artificial sequence
  synthetic peptide
LNVWIPAPKPKNATVLIWIYGGGFQ

SEQ ID NO: 11303 - protein, 25 aa, Artificial sequence
  synthetic peptide
NVWIPAPKPKNATVLIWIYGGGFQT

SEQ ID NO: 11304 - protein, 25 aa, Artificial sequence
  synthetic peptide
VWIPAPKPKNATVLIWIYGGGFQTG

SEQ ID NO: 11305 - protein, 25 aa, Artificial sequence
  synthetic peptide
WIPAPKPKNATVLIWIYGGGFQTGT

SEQ ID NO: 11306 - protein, 25 aa, Artificial sequence
  synthetic peptide
IPAPKPKNATVLIWIYGGGFQTGTS

SEQ ID NO: 11307 - protein, 25 aa, Artificial sequence
  synthetic peptide
PAPKPKNATVLIWIYGGGFQTGTSS

SEQ ID NO: 11308 - protein, 25 aa, Artificial sequence
  synthetic peptide
APKPKNATVLIWIYGGGFQTGTSSL

SEQ ID NO: 11309 - protein, 25 aa, Artificial sequence
  synthetic peptide
PKPKNATVLIWIYGGGFQTGTSSLH

SEQ ID NO: 11310 - protein, 25 aa, Artificial sequence
  synthetic peptide
KPKNATVLIWIYGGGFQTGTSSLHV

SEQ ID NO: 11311 - protein, 25 aa, Artificial sequence
  synthetic peptide
PKNATVLIWIYGGGFQTGTSSLHVY

SEQ ID NO: 11312 - protein, 25 aa, Artificial sequence
  synthetic peptide
KNATVLIWIYGGGFQTGTSSLHVYD

SEQ ID NO: 11313 - protein, 25 aa, Artificial sequence
  synthetic peptide
NATVLIWIYGGGFQTGTSSLHVYDG

SEQ ID NO: 11314 - protein, 25 aa, Artificial sequence
  synthetic peptide
ATVLIWIYGGGFQTGTSSLHVYDGK

SEQ ID NO: 11315 - protein, 25 aa, Artificial sequence
  synthetic peptide
TVLIWIYGGGFQTGTSSLHVYDGKF

SEQ ID NO: 11316 - protein, 25 aa, Artificial sequence
  synthetic peptide
VLIWIYGGGFQTGTSSLHVYDGKFL

SEQ ID NO: 11317 - protein, 25 aa, Artificial sequence
  synthetic peptide
LIWIYGGGFQTGTSSLHVYDGKFLA

SEQ ID NO: 11318 - protein, 25 aa, Artificial sequence
  synthetic peptide
IWIYGGGFQTGTSSLHVYDGKFLAR

SEQ ID NO: 11319 - protein, 25 aa, Artificial sequence
  synthetic peptide
WIYGGGFQTGTSSLHVYDGKFLARV

SEQ ID NO: 11320 - protein, 25 aa, Artificial sequence
  synthetic peptide
IYGGGFQTGTSSLHVYDGKFLARVE

SEQ ID NO: 11321 - protein, 25 aa, Artificial sequence
  synthetic peptide
YGGGFQTGTSSLHVYDGKFLARVER

SEQ ID NO: 11322 - protein, 25 aa, Artificial sequence
  synthetic peptide
GGGFQTGTSSLHVYDGKFLARVERV

SEQ ID NO: 11323 - protein, 25 aa, Artificial sequence
  synthetic peptide
GGFQTGTSSLHVYDGKFLARVERVI

SEQ ID NO: 11324 - protein, 25 aa, Artificial sequence
  synthetic peptide
GFQTGTSSLHVYDGKFLARVERVIV

SEQ ID NO: 11325 - protein, 25 aa, Artificial sequence
  synthetic peptide
FQTGTSSLHVYDGKFLARVERVIVV

SEQ ID NO: 11326 - protein, 25 aa, Artificial sequence
  synthetic peptide
QTGTSSLHVYDGKFLARVERVIVVS

SEQ ID NO: 11327 - protein, 25 aa, Artificial sequence
  synthetic peptide
TGTSSLHVYDGKFLARVERVIVVSM

SEQ ID NO: 11328 - protein, 25 aa, Artificial sequence
  synthetic peptide
GTSSLHVYDGKFLARVERVIVVSMN

SEQ ID NO: 11329 - protein, 25 aa, Artificial sequence
  synthetic peptide
TSSLHVYDGKFLARVERVIVVSMNY

SEQ ID NO: 11330 - protein, 25 aa, Artificial sequence
  synthetic peptide
SSLHVYDGKFLARVERVIVVSMNYR

SEQ ID NO: 11331 - protein, 25 aa, Artificial sequence
  synthetic peptide
SLHVYDGKFLARVERVIVVSMNYRV

SEQ ID NO: 11332 - protein, 25 aa, Artificial sequence
  synthetic peptide
LHVYDGKFLARVERVIVVSMNYRVG

SEQ ID NO: 11333 - protein, 25 aa, Artificial sequence
  synthetic peptide
HVYDGKFLARVERVIVVSMNYRVGA

SEQ ID NO: 11334 - protein, 25 aa, Artificial sequence
  synthetic peptide
VYDGKFLARVERVIVVSMNYRVGAL

SEQ ID NO: 11335 - protein, 25 aa, Artificial sequence
  synthetic peptide
YDGKFLARVERVIVVSMNYRVGALG

SEQ ID NO: 11336 - protein, 25 aa, Artificial sequence
  synthetic peptide
DGKFLARVERVIVVSMNYRVGALGF

SEQ ID NO: 11337 - protein, 25 aa, Artificial sequence
  synthetic peptide
GKFLARVERVIVVSMNYRVGALGFL

SEQ ID NO: 11338 - protein, 25 aa, Artificial sequence
  synthetic peptide
KFLARVERVIVVSMNYRVGALGFLA

SEQ ID NO: 11339 - protein, 25 aa, Artificial sequence
  synthetic peptide
FLARVERVIVVSMNYRVGALGFLAL

SEQ ID NO: 11340 - protein, 25 aa, Artificial sequence
  synthetic peptide
LARVERVIVVSMNYRVGALGFLALP

SEQ ID NO: 11341 - protein, 25 aa, Artificial sequence
  synthetic peptide
ARVERVIVVSMNYRVGALGFLALPG

SEQ ID NO: 11342 - protein, 25 aa, Artificial sequence
  synthetic peptide
RVERVIVVSMNYRVGALGFLALPGN

SEQ ID NO: 11343 - protein, 25 aa, Artificial sequence
  synthetic peptide
VERVIVVSMNYRVGALGFLALPGNP

SEQ ID NO: 11344 - protein, 25 aa, Artificial sequence
  synthetic peptide
ERVIVVSMNYRVGALGFLALPGNPE

SEQ ID NO: 11345 - protein, 25 aa, Artificial sequence
  synthetic peptide
RVIVVSMNYRVGALGFLALPGNPEA

SEQ ID NO: 11346 - protein, 25 aa, Artificial sequence
  synthetic peptide
VIVVSMNYRVGALGFLALPGNPEAP

SEQ ID NO: 11347 - protein, 25 aa, Artificial sequence
  synthetic peptide
IVVSMNYRVGALGFLALPGNPEAPG

SEQ ID NO: 11348 - protein, 25 aa, Artificial sequence
  synthetic peptide
VVSMNYRVGALGFLALPGNPEAPGN

SEQ ID NO: 11349 - protein, 25 aa, Artificial sequence
  synthetic peptide
VSMNYRVGALGFLALPGNPEAPGNM

SEQ ID NO: 11350 - protein, 25 aa, Artificial sequence
  synthetic peptide
SMNYRVGALGFLALPGNPEAPGNMG

SEQ ID NO: 11351 - protein, 25 aa, Artificial sequence
  synthetic peptide
MNYRVGALGFLALPGNPEAPGNMGL

SEQ ID NO: 11352 - protein, 25 aa, Artificial sequence
  synthetic peptide
NYRVGALGFLALPGNPEAPGNMGLF

SEQ ID NO: 11353 - protein, 25 aa, Artificial sequence
  synthetic peptide
YRVGALGFLALPGNPEAPGNMGLFD

SEQ ID NO: 11354 - protein, 25 aa, Artificial sequence
  synthetic peptide
RVGALGFLALPGNPEAPGNMGLFDQ

SEQ ID NO: 11355 - protein, 25 aa, Artificial sequence
  synthetic peptide
VGALGFLALPGNPEAPGNMGLFDQQ

SEQ ID NO: 11356 - protein, 25 aa, Artificial sequence
  synthetic peptide
GALGFLALPGNPEAPGNMGLFDQQL

SEQ ID NO: 11357 - protein, 25 aa, Artificial sequence
  synthetic peptide
ALGFLALPGNPEAPGNMGLFDQQLA

SEQ ID NO: 11358 - protein, 25 aa, Artificial sequence
  synthetic peptide
LGFLALPGNPEAPGNMGLFDQQLAL

SEQ ID NO: 11359 - protein, 25 aa, Artificial sequence
  synthetic peptide
GFLALPGNPEAPGNMGLFDQQLALQ

SEQ ID NO: 11360 - protein, 25 aa, Artificial sequence
  synthetic peptide
FLALPGNPEAPGNMGLFDQQLALQW

SEQ ID NO: 11361 - protein, 25 aa, Artificial sequence
  synthetic peptide
LALPGNPEAPGNMGLFDQQLALQWV

SEQ ID NO: 11362 - protein, 25 aa, Artificial sequence
  synthetic peptide
ALPGNPEAPGNMGLFDQQLALQWVQ

SEQ ID NO: 11363 - protein, 25 aa, Artificial sequence
  synthetic peptide
LPGNPEAPGNMGLFDQQLALQWVQK

SEQ ID NO: 11364 - protein, 25 aa, Artificial sequence
  synthetic peptide
PGNPEAPGNMGLFDQQLALQWVQKN

SEQ ID NO: 11365 - protein, 25 aa, Artificial sequence
  synthetic peptide
GNPEAPGNMGLFDQQLALQWVQKNI

SEQ ID NO: 11366 - protein, 25 aa, Artificial sequence
  synthetic peptide
NPEAPGNMGLFDQQLALQWVQKNIA

SEQ ID NO: 11367 - protein, 25 aa, Artificial sequence
  synthetic peptide
PEAPGNMGLFDQQLALQWVQKNIAA

SEQ ID NO: 11368 - protein, 25 aa, Artificial sequence
  synthetic peptide
EAPGNMGLFDQQLALQWVQKNIAAF

SEQ ID NO: 11369 - protein, 25 aa, Artificial sequence
  synthetic peptide
APGNMGLFDQQLALQWVQKNIAAFG

SEQ ID NO: 11370 - protein, 25 aa, Artificial sequence
  synthetic peptide
PGNMGLFDQQLALQWVQKNIAAFGG

SEQ ID NO: 11371 - protein, 25 aa, Artificial sequence
  synthetic peptide
GNMGLFDQQLALQWVQKNIAAFGGN

SEQ ID NO: 11372 - protein, 25 aa, Artificial sequence
  synthetic peptide
NMGLFDQQLALQWVQKNIAAFGGNP

SEQ ID NO: 11373 - protein, 25 aa, Artificial sequence
  synthetic peptide
MGLFDQQLALQWVQKNIAAFGGNPK

SEQ ID NO: 11374 - protein, 25 aa, Artificial sequence
  synthetic peptide
GLFDQQLALQWVQKNIAAFGGNPKS

SEQ ID NO: 11375 - protein, 25 aa, Artificial sequence
  synthetic peptide
LFDQQLALQWVQKNIAAFGGNPKSV

SEQ ID NO: 11376 - protein, 25 aa, Artificial sequence
  synthetic peptide
FDQQLALQWVQKNIAAFGGNPKSVT

SEQ ID NO: 11377 - protein, 25 aa, Artificial sequence
  synthetic peptide
DQQLALQWVQKNIAAFGGNPKSVTL

SEQ ID NO: 11378 - protein, 25 aa, Artificial sequence
  synthetic peptide
QQLALQWVQKNIAAFGGNPKSVTLF

SEQ ID NO: 11379 - protein, 25 aa, Artificial sequence
  synthetic peptide
QLALQWVQKNIAAFGGNPKSVTLFG

SEQ ID NO: 11380 - protein, 25 aa, Artificial sequence
  synthetic peptide
LALQWVQKNIAAFGGNPKSVTLFGE

SEQ ID NO: 11381 - protein, 25 aa, Artificial sequence
  synthetic peptide
ALQWVQKNIAAFGGNPKSVTLFGES

SEQ ID NO: 11382 - protein, 25 aa, Artificial sequence
  synthetic peptide
LQWVQKNIAAFGGNPKSVTLFGESA

SEQ ID NO: 11383 - protein, 25 aa, Artificial sequence
  synthetic peptide
QWVQKNIAAFGGNPKSVTLFGESAG

SEQ ID NO: 11384 - protein, 25 aa, Artificial sequence
  synthetic peptide
WVQKNIAAFGGNPKSVTLFGESAGA

SEQ ID NO: 11385 - protein, 25 aa, Artificial sequence
  synthetic peptide
VQKNIAAFGGNPKSVTLFGESAGAA

SEQ ID NO: 11386 - protein, 25 aa, Artificial sequence
  synthetic peptide
QKNIAAFGGNPKSVTLFGESAGAAS

SEQ ID NO: 11387 - protein, 25 aa, Artificial sequence
  synthetic peptide
KNIAAFGGNPKSVTLFGESAGAASV

SEQ ID NO: 11388 - protein, 25 aa, Artificial sequence
  synthetic peptide
NIAAFGGNPKSVTLFGESAGAASVS

SEQ ID NO: 11389 - protein, 25 aa, Artificial sequence
  synthetic peptide
IAAFGGNPKSVTLFGESAGAASVSL

SEQ ID NO: 11390 - protein, 25 aa, Artificial sequence
  synthetic peptide
AAFGGNPKSVTLFGESAGAASVSLH

SEQ ID NO: 11391 - protein, 25 aa, Artificial sequence
  synthetic peptide
AFGGNPKSVTLFGESAGAASVSLHL

SEQ ID NO: 11392 - protein, 25 aa, Artificial sequence
  synthetic peptide
FGGNPKSVTLFGESAGAASVSLHLL

SEQ ID NO: 11393 - protein, 25 aa, Artificial sequence
  synthetic peptide
GGNPKSVTLFGESAGAASVSLHLLS

SEQ ID NO: 11394 - protein, 25 aa, Artificial sequence
  synthetic peptide
GNPKSVTLFGESAGAASVSLHLLSP

SEQ ID NO: 11395 - protein, 25 aa, Artificial sequence
  synthetic peptide
NPKSVTLFGESAGAASVSLHLLSPG

SEQ ID NO: 11396 - protein, 25 aa, Artificial sequence
  synthetic peptide
PKSVTLFGESAGAASVSLHLLSPGS

SEQ ID NO: 11397 - protein, 25 aa, Artificial sequence
  synthetic peptide
KSVTLFGESAGAASVSLHLLSPGSH

SEQ ID NO: 11398 - protein, 25 aa, Artificial sequence
  synthetic peptide
SVTLFGESAGAASVSLHLLSPGSHS

SEQ ID NO: 11399 - protein, 25 aa, Artificial sequence
  synthetic peptide
VTLFGESAGAASVSLHLLSPGSHSL

SEQ ID NO: 11400 - protein, 25 aa, Artificial sequence
  synthetic peptide
TLFGESAGAASVSLHLLSPGSHSLF

SEQ ID NO: 11401 - protein, 25 aa, Artificial sequence
  synthetic peptide
LFGESAGAASVSLHLLSPGSHSLFT

SEQ ID NO: 11402 - protein, 25 aa, Artificial sequence
  synthetic peptide
FGESAGAASVSLHLLSPGSHSLFTR

SEQ ID NO: 11403 - protein, 25 aa, Artificial sequence
  synthetic peptide
GESAGAASVSLHLLSPGSHSLFTRA

SEQ ID NO: 11404 - protein, 25 aa, Artificial sequence
  synthetic peptide
ESAGAASVSLHLLSPGSHSLFTRAI

SEQ ID NO: 11405 - protein, 25 aa, Artificial sequence
  synthetic peptide
SAGAASVSLHLLSPGSHSLFTRAIL

SEQ ID NO: 11406 - protein, 25 aa, Artificial sequence
  synthetic peptide
AGAASVSLHLLSPGSHSLFTRAILQ

SEQ ID NO: 11407 - protein, 25 aa, Artificial sequence
  synthetic peptide
GAASVSLHLLSPGSHSLFTRAILQS

SEQ ID NO: 11408 - protein, 25 aa, Artificial sequence
  synthetic peptide
AASVSLHLLSPGSHSLFTRAILQSG

SEQ ID NO: 11409 - protein, 25 aa, Artificial sequence
  synthetic peptide
ASVSLHLLSPGSHSLFTRAILQSGS

SEQ ID NO: 11410 - protein, 25 aa, Artificial sequence
  synthetic peptide
SVSLHLLSPGSHSLFTRAILQSGSF

SEQ ID NO: 11411 - protein, 25 aa, Artificial sequence
  synthetic peptide
VSLHLLSPGSHSLFTRAILQSGSFN

SEQ ID NO: 11412 - protein, 25 aa, Artificial sequence
  synthetic peptide
SLHLLSPGSHSLFTRAILQSGSFNA

SEQ ID NO: 11413 - protein, 25 aa, Artificial sequence
  synthetic peptide
LHLLSPGSHSLFTRAILQSGSFNAP

SEQ ID NO: 11414 - protein, 25 aa, Artificial sequence
  synthetic peptide
HLLSPGSHSLFTRAILQSGSFNAPW

SEQ ID NO: 11415 - protein, 25 aa, Artificial sequence
  synthetic peptide
LLSPGSHSLFTRAILQSGSFNAPWA

SEQ ID NO: 11416 - protein, 25 aa, Artificial sequence
  synthetic peptide
LSPGSHSLFTRAILQSGSFNAPWAV

SEQ ID NO: 11417 - protein, 25 aa, Artificial sequence
  synthetic peptide
SPGSHSLFTRAILQSGSFNAPWAVT

SEQ ID NO: 11418 - protein, 25 aa, Artificial sequence
  synthetic peptide
PGSHSLFTRAILQSGSFNAPWAVTS

SEQ ID NO: 11419 - protein, 25 aa, Artificial sequence
  synthetic peptide
GSHSLFTRAILQSGSFNAPWAVTSL

SEQ ID NO: 11420 - protein, 25 aa, Artificial sequence
  synthetic peptide
SHSLFTRAILQSGSFNAPWAVTSLY

SEQ ID NO: 11421 - protein, 25 aa, Artificial sequence
  synthetic peptide
HSLFTRAILQSGSFNAPWAVTSLYE

SEQ ID NO: 11422 - protein, 25 aa, Artificial sequence
  synthetic peptide
SLFTRAILQSGSFNAPWAVTSLYEA

SEQ ID NO: 11423 - protein, 25 aa, Artificial sequence
  synthetic peptide
LFTRAILQSGSFNAPWAVTSLYEAR

SEQ ID NO: 11424 - protein, 25 aa, Artificial sequence
  synthetic peptide
FTRAILQSGSFNAPWAVTSLYEARN

SEQ ID NO: 11425 - protein, 25 aa, Artificial sequence
  synthetic peptide
TRAILQSGSFNAPWAVTSLYEARNR

SEQ ID NO: 11426 - protein, 25 aa, Artificial sequence
  synthetic peptide
RAILQSGSFNAPWAVTSLYEARNRT

SEQ ID NO: 11427 - protein, 25 aa, Artificial sequence
  synthetic peptide
AILQSGSFNAPWAVTSLYEARNRTL

SEQ ID NO: 11428 - protein, 25 aa, Artificial sequence
  synthetic peptide
ILQSGSFNAPWAVTSLYEARNRTLN

SEQ ID NO: 11429 - protein, 25 aa, Artificial sequence
  synthetic peptide
LQSGSFNAPWAVTSLYEARNRTLNL

SEQ ID NO: 11430 - protein, 25 aa, Artificial sequence
  synthetic peptide
QSGSFNAPWAVTSLYEARNRTLNLA

SEQ ID NO: 11431 - protein, 25 aa, Artificial sequence
  synthetic peptide
SGSFNAPWAVTSLYEARNRTLNLAK

SEQ ID NO: 11432 - protein, 25 aa, Artificial sequence
  synthetic peptide
GSFNAPWAVTSLYEARNRTLNLAKL

SEQ ID NO: 11433 - protein, 25 aa, Artificial sequence
  synthetic peptide
SFNAPWAVTSLYEARNRTLNLAKLT

SEQ ID NO: 11434 - protein, 25 aa, Artificial sequence
  synthetic peptide
FNAPWAVTSLYEARNRTLNLAKLTG

SEQ ID NO: 11435 - protein, 25 aa, Artificial sequence
  synthetic peptide
NAPWAVTSLYEARNRTLNLAKLTGC

SEQ ID NO: 11436 - protein, 25 aa, Artificial sequence
  synthetic peptide
APWAVTSLYEARNRTLNLAKLTGCS

SEQ ID NO: 11437 - protein, 25 aa, Artificial sequence
  synthetic peptide
PWAVTSLYEARNRTLNLAKLTGCSR

SEQ ID NO: 11438 - protein, 25 aa, Artificial sequence
  synthetic peptide
WAVTSLYEARNRTLNLAKLTGCSRE

SEQ ID NO: 11439 - protein, 25 aa, Artificial sequence
  synthetic peptide
AVTSLYEARNRTLNLAKLTGCSREN

SEQ ID NO: 11440 - protein, 25 aa, Artificial sequence
  synthetic peptide
VTSLYEARNRTLNLAKLTGCSRENE

SEQ ID NO: 11441 - protein, 25 aa, Artificial sequence
  synthetic peptide
TSLYEARNRTLNLAKLTGCSRENET

SEQ ID NO: 11442 - protein, 25 aa, Artificial sequence
  synthetic peptide
SLYEARNRTLNLAKLTGCSRENETE

SEQ ID NO: 11443 - protein, 25 aa, Artificial sequence
  synthetic peptide
LYEARNRTLNLAKLTGCSRENETEI

SEQ ID NO: 11444 - protein, 25 aa, Artificial sequence
  synthetic peptide
YEARNRTLNLAKLTGCSRENETEII

SEQ ID NO: 11445 - protein, 25 aa, Artificial sequence
  synthetic peptide
EARNRTLNLAKLTGCSRENETEIIK

SEQ ID NO: 11446 - protein, 25 aa, Artificial sequence
  synthetic peptide
ARNRTLNLAKLTGCSRENETEIIKC

SEQ ID NO: 11447 - protein, 25 aa, Artificial sequence
  synthetic peptide
RNRTLNLAKLTGCSRENETEIIKCL

SEQ ID NO: 11448 - protein, 25 aa, Artificial sequence
  synthetic peptide
NRTLNLAKLTGCSRENETEIIKCLR

SEQ ID NO: 11449 - protein, 25 aa, Artificial sequence
  synthetic peptide
RTLNLAKLTGCSRENETEIIKCLRN

SEQ ID NO: 11450 - protein, 25 aa, Artificial sequence
  synthetic peptide
TLNLAKLTGCSRENETEIIKCLRNK

SEQ ID NO: 11451 - protein, 25 aa, Artificial sequence
  synthetic peptide
LNLAKLTGCSRENETEIIKCLRNKD

SEQ ID NO: 11452 - protein, 25 aa, Artificial sequence
  synthetic peptide
NLAKLTGCSRENETEIIKCLRNKDP

SEQ ID NO: 11453 - protein, 25 aa, Artificial sequence
  synthetic peptide
LAKLTGCSRENETEIIKCLRNKDPQ

SEQ ID NO: 11454 - protein, 25 aa, Artificial sequence
  synthetic peptide
AKLTGCSRENETEIIKCLRNKDPQE

SEQ ID NO: 11455 - protein, 25 aa, Artificial sequence
  synthetic peptide
KLTGCSRENETEIIKCLRNKDPQEI

SEQ ID NO: 11456 - protein, 25 aa, Artificial sequence
  synthetic peptide
LTGCSRENETEIIKCLRNKDPQEIL

SEQ ID NO: 11457 - protein, 25 aa, Artificial sequence
  synthetic peptide
TGCSRENETEIIKCLRNKDPQEILL

SEQ ID NO: 11458 - protein, 25 aa, Artificial sequence
  synthetic peptide
GCSRENETEIIKCLRNKDPQEILLN

SEQ ID NO: 11459 - protein, 25 aa, Artificial sequence
  synthetic peptide
CSRENETEIIKCLRNKDPQEILLNE

SEQ ID NO: 11460 - protein, 25 aa, Artificial sequence
  synthetic peptide
SRENETEIIKCLRNKDPQEILLNEA

SEQ ID NO: 11461 - protein, 25 aa, Artificial sequence
  synthetic peptide
RENETEIIKCLRNKDPQEILLNEAF

SEQ ID NO: 11462 - protein, 25 aa, Artificial sequence
  synthetic peptide
ENETEIIKCLRNKDPQEILLNEAFV

SEQ ID NO: 11463 - protein, 25 aa, Artificial sequence
  synthetic peptide
NETEIIKCLRNKDPQEILLNEAFVV

SEQ ID NO: 11464 - protein, 25 aa, Artificial sequence
  synthetic peptide
ETEIIKCLRNKDPQEILLNEAFVVP

SEQ ID NO: 11465 - protein, 25 aa, Artificial sequence
  synthetic peptide
TEIIKCLRNKDPQEILLNEAFVVPY

SEQ ID NO: 11466 - protein, 25 aa, Artificial sequence
  synthetic peptide
EIIKCLRNKDPQEILLNEAFVVPYG

SEQ ID NO: 11467 - protein, 25 aa, Artificial sequence
  synthetic peptide
IIKCLRNKDPQEILLNEAFVVPYGT

SEQ ID NO: 11468 - protein, 25 aa, Artificial sequence
  synthetic peptide
IKCLRNKDPQEILLNEAFVVPYGTP

SEQ ID NO: 11469 - protein, 25 aa, Artificial sequence
  synthetic peptide
KCLRNKDPQEILLNEAFVVPYGTPL

SEQ ID NO: 11470 - protein, 25 aa, Artificial sequence
  synthetic peptide
CLRNKDPQEILLNEAFVVPYGTPLS

SEQ ID NO: 11471 - protein, 25 aa, Artificial sequence
  synthetic peptide
LRNKDPQEILLNEAFVVPYGTPLSV

SEQ ID NO: 11472 - protein, 25 aa, Artificial sequence
  synthetic peptide
RNKDPQEILLNEAFVVPYGTPLSVN

SEQ ID NO: 11473 - protein, 25 aa, Artificial sequence
  synthetic peptide
NKDPQEILLNEAFVVPYGTPLSVNF

SEQ ID NO: 11474 - protein, 25 aa, Artificial sequence
  synthetic peptide
KDPQEILLNEAFVVPYGTPLSVNFG

SEQ ID NO: 11475 - protein, 25 aa, Artificial sequence
  synthetic peptide
DPQEILLNEAFVVPYGTPLSVNFGP

SEQ ID NO: 11476 - protein, 25 aa, Artificial sequence
  synthetic peptide
PQEILLNEAFVVPYGTPLSVNFGPT

SEQ ID NO: 11477 - protein, 25 aa, Artificial sequence
  synthetic peptide
QEILLNEAFVVPYGTPLSVNFGPTV

SEQ ID NO: 11478 - protein, 25 aa, Artificial sequence
  synthetic peptide
EILLNEAFVVPYGTPLSVNFGPTVD

SEQ ID NO: 11479 - protein, 25 aa, Artificial sequence
  synthetic peptide
ILLNEAFVVPYGTPLSVNFGPTVDG

SEQ ID NO: 11480 - protein, 25 aa, Artificial sequence
  synthetic peptide
LLNEAFVVPYGTPLSVNFGPTVDGD

SEQ ID NO: 11481 - protein, 25 aa, Artificial sequence
  synthetic peptide
LNEAFVVPYGTPLSVNFGPTVDGDF

SEQ ID NO: 11482 - protein, 25 aa, Artificial sequence
  synthetic peptide
NEAFVVPYGTPLSVNFGPTVDGDFL

SEQ ID NO: 11483 - protein, 25 aa, Artificial sequence
  synthetic peptide
EAFVVPYGTPLSVNFGPTVDGDFLT

SEQ ID NO: 11484 - protein, 25 aa, Artificial sequence
  synthetic peptide
AFVVPYGTPLSVNFGPTVDGDFLTD

SEQ ID NO: 11485 - protein, 25 aa, Artificial sequence
  synthetic peptide
FVVPYGTPLSVNFGPTVDGDFLTDM

SEQ ID NO: 11486 - protein, 25 aa, Artificial sequence
  synthetic peptide
VVPYGTPLSVNFGPTVDGDFLTDMP

SEQ ID NO: 11487 - protein, 25 aa, Artificial sequence
  synthetic peptide
VPYGTPLSVNFGPTVDGDFLTDMPD

SEQ ID NO: 11488 - protein, 25 aa, Artificial sequence
  synthetic peptide
PYGTPLSVNFGPTVDGDFLTDMPDI

SEQ ID NO: 11489 - protein, 25 aa, Artificial sequence
  synthetic peptide
YGTPLSVNFGPTVDGDFLTDMPDIL

SEQ ID NO: 11490 - protein, 25 aa, Artificial sequence
  synthetic peptide
GTPLSVNFGPTVDGDFLTDMPDILL

SEQ ID NO: 11491 - protein, 25 aa, Artificial sequence
  synthetic peptide
TPLSVNFGPTVDGDFLTDMPDILLE

SEQ ID NO: 11492 - protein, 25 aa, Artificial sequence
  synthetic peptide
PLSVNFGPTVDGDFLTDMPDILLEL

SEQ ID NO: 11493 - protein, 25 aa, Artificial sequence
  synthetic peptide
LSVNFGPTVDGDFLTDMPDILLELG

SEQ ID NO: 11494 - protein, 25 aa, Artificial sequence
  synthetic peptide
SVNFGPTVDGDFLTDMPDILLELGQ

SEQ ID NO: 11495 - protein, 25 aa, Artificial sequence
  synthetic peptide
VNFGPTVDGDFLTDMPDILLELGQF

SEQ ID NO: 11496 - protein, 25 aa, Artificial sequence
  synthetic peptide
NFGPTVDGDFLTDMPDILLELGQFK

SEQ ID NO: 11497 - protein, 25 aa, Artificial sequence
  synthetic peptide
FGPTVDGDFLTDMPDILLELGQFKK

SEQ ID NO: 11498 - protein, 25 aa, Artificial sequence
  synthetic peptide
GPTVDGDFLTDMPDILLELGQFKKT

SEQ ID NO: 11499 - protein, 25 aa, Artificial sequence
  synthetic peptide
PTVDGDFLTDMPDILLELGQFKKTQ

SEQ ID NO: 11500 - protein, 25 aa, Artificial sequence
  synthetic peptide
TVDGDFLTDMPDILLELGQFKKTQI

SEQ ID NO: 11501 - protein, 25 aa, Artificial sequence
  synthetic peptide
VDGDFLTDMPDILLELGQFKKTQIL

SEQ ID NO: 11502 - protein, 25 aa, Artificial sequence
  synthetic peptide
DGDFLTDMPDILLELGQFKKTQILV

SEQ ID NO: 11503 - protein, 25 aa, Artificial sequence
  synthetic peptide
GDFLTDMPDILLELGQFKKTQILVG

SEQ ID NO: 11504 - protein, 25 aa, Artificial sequence
  synthetic peptide
DFLTDMPDILLELGQFKKTQILVGV

SEQ ID NO: 11505 - protein, 25 aa, Artificial sequence
  synthetic peptide
FLTDMPDILLELGQFKKTQILVGVN

SEQ ID NO: 11506 - protein, 25 aa, Artificial sequence
  synthetic peptide
LTDMPDILLELGQFKKTQILVGVNK

SEQ ID NO: 11507 - protein, 25 aa, Artificial sequence
  synthetic peptide
TDMPDILLELGQFKKTQILVGVNKD

SEQ ID NO: 11508 - protein, 25 aa, Artificial sequence
  synthetic peptide
DMPDILLELGQFKKTQILVGVNKDE

SEQ ID NO: 11509 - protein, 25 aa, Artificial sequence
  synthetic peptide
MPDILLELGQFKKTQILVGVNKDEG

SEQ ID NO: 11510 - protein, 25 aa, Artificial sequence
  synthetic peptide
PDILLELGQFKKTQILVGVNKDEGT

SEQ ID NO: 11511 - protein, 25 aa, Artificial sequence
  synthetic peptide
DILLELGQFKKTQILVGVNKDEGTA

SEQ ID NO: 11512 - protein, 25 aa, Artificial sequence
  synthetic peptide
ILLELGQFKKTQILVGVNKDEGTAF

SEQ ID NO: 11513 - protein, 25 aa, Artificial sequence
  synthetic peptide
LLELGQFKKTQILVGVNKDEGTAFL

SEQ ID NO: 11514 - protein, 25 aa, Artificial sequence
  synthetic peptide
LELGQFKKTQILVGVNKDEGTAFLV

SEQ ID NO: 11515 - protein, 25 aa, Artificial sequence
  synthetic peptide
ELGQFKKTQILVGVNKDEGTAFLVY

SEQ ID NO: 11516 - protein, 25 aa, Artificial sequence
  synthetic peptide
LGQFKKTQILVGVNKDEGTAFLVYG

SEQ ID NO: 11517 - protein, 25 aa, Artificial sequence
  synthetic peptide
GQFKKTQILVGVNKDEGTAFLVYGA

SEQ ID NO: 11518 - protein, 25 aa, Artificial sequence
  synthetic peptide
QFKKTQILVGVNKDEGTAFLVYGAP

SEQ ID NO: 11519 - protein, 25 aa, Artificial sequence
  synthetic peptide
FKKTQILVGVNKDEGTAFLVYGAPG

SEQ ID NO: 11520 - protein, 25 aa, Artificial sequence
  synthetic peptide
KKTQILVGVNKDEGTAFLVYGAPGF

SEQ ID NO: 11521 - protein, 25 aa, Artificial sequence
  synthetic peptide
KTQILVGVNKDEGTAFLVYGAPGFS

SEQ ID NO: 11522 - protein, 25 aa, Artificial sequence
  synthetic peptide
TQILVGVNKDEGTAFLVYGAPGFSK

SEQ ID NO: 11523 - protein, 25 aa, Artificial sequence
  synthetic peptide
QILVGVNKDEGTAFLVYGAPGFSKD

SEQ ID NO: 11524 - protein, 25 aa, Artificial sequence
  synthetic peptide
ILVGVNKDEGTAFLVYGAPGFSKDN

SEQ ID NO: 11525 - protein, 25 aa, Artificial sequence
  synthetic peptide
LVGVNKDEGTAFLVYGAPGFSKDNN

SEQ ID NO: 11526 - protein, 25 aa, Artificial sequence
  synthetic peptide
VGVNKDEGTAFLVYGAPGFSKDNNS

SEQ ID NO: 11527 - protein, 25 aa, Artificial sequence
  synthetic peptide
GVNKDEGTAFLVYGAPGFSKDNNSI

SEQ ID NO: 11528 - protein, 25 aa, Artificial sequence
  synthetic peptide
VNKDEGTAFLVYGAPGFSKDNNSII

SEQ ID NO: 11529 - protein, 25 aa, Artificial sequence
  synthetic peptide
NKDEGTAFLVYGAPGFSKDNNSIIT

SEQ ID NO: 11530 - protein, 25 aa, Artificial sequence
  synthetic peptide
KDEGTAFLVYGAPGFSKDNNSIITR

SEQ ID NO: 11531 - protein, 25 aa, Artificial sequence
  synthetic peptide
DEGTAFLVYGAPGFSKDNNSIITRK

SEQ ID NO: 11532 - protein, 25 aa, Artificial sequence
  synthetic peptide
EGTAFLVYGAPGFSKDNNSIITRKE

SEQ ID NO: 11533 - protein, 25 aa, Artificial sequence
  synthetic peptide
GTAFLVYGAPGFSKDNNSIITRKEF

SEQ ID NO: 11534 - protein, 25 aa, Artificial sequence
  synthetic peptide
TAFLVYGAPGFSKDNNSIITRKEFQ

SEQ ID NO: 11535 - protein, 25 aa, Artificial sequence
  synthetic peptide
AFLVYGAPGFSKDNNSIITRKEFQE

SEQ ID NO: 11536 - protein, 25 aa, Artificial sequence
  synthetic peptide
FLVYGAPGFSKDNNSIITRKEFQEG

SEQ ID NO: 11537 - protein, 25 aa, Artificial sequence
  synthetic peptide
LVYGAPGFSKDNNSIITRKEFQEGL

SEQ ID NO: 11538 - protein, 25 aa, Artificial sequence
  synthetic peptide
VYGAPGFSKDNNSIITRKEFQEGLK

SEQ ID NO: 11539 - protein, 25 aa, Artificial sequence
  synthetic peptide
YGAPGFSKDNNSIITRKEFQEGLKI

SEQ ID NO: 11540 - protein, 25 aa, Artificial sequence
  synthetic peptide
GAPGFSKDNNSIITRKEFQEGLKIF

SEQ ID NO: 11541 - protein, 25 aa, Artificial sequence
  synthetic peptide
APGFSKDNNSIITRKEFQEGLKIFF

SEQ ID NO: 11542 - protein, 25 aa, Artificial sequence
  synthetic peptide
PGFSKDNNSIITRKEFQEGLKIFFP

SEQ ID NO: 11543 - protein, 25 aa, Artificial sequence
  synthetic peptide
GFSKDNNSIITRKEFQEGLKIFFPG

SEQ ID NO: 11544 - protein, 25 aa, Artificial sequence
  synthetic peptide
FSKDNNSIITRKEFQEGLKIFFPGV

SEQ ID NO: 11545 - protein, 25 aa, Artificial sequence
  synthetic peptide
SKDNNSIITRKEFQEGLKIFFPGVS

SEQ ID NO: 11546 - protein, 25 aa, Artificial sequence
  synthetic peptide
KDNNSIITRKEFQEGLKIFFPGVSE

SEQ ID NO: 11547 - protein, 25 aa, Artificial sequence
  synthetic peptide
DNNSIITRKEFQEGLKIFFPGVSEF

SEQ ID NO: 11548 - protein, 25 aa, Artificial sequence
  synthetic peptide
NNSIITRKEFQEGLKIFFPGVSEFG

SEQ ID NO: 11549 - protein, 25 aa, Artificial sequence
  synthetic peptide
NSIITRKEFQEGLKIFFPGVSEFGK

SEQ ID NO: 11550 - protein, 25 aa, Artificial sequence
  synthetic peptide
SIITRKEFQEGLKIFFPGVSEFGKE

SEQ ID NO: 11551 - protein, 25 aa, Artificial sequence
  synthetic peptide
IITRKEFQEGLKIFFPGVSEFGKES

SEQ ID NO: 11552 - protein, 25 aa, Artificial sequence
  synthetic peptide
ITRKEFQEGLKIFFPGVSEFGKESI

SEQ ID NO: 11553 - protein, 25 aa, Artificial sequence
  synthetic peptide
TRKEFQEGLKIFFPGVSEFGKESIL

SEQ ID NO: 11554 - protein, 25 aa, Artificial sequence
  synthetic peptide
RKEFQEGLKIFFPGVSEFGKESILF

SEQ ID NO: 11555 - protein, 25 aa, Artificial sequence
  synthetic peptide
KEFQEGLKIFFPGVSEFGKESILFH

SEQ ID NO: 11556 - protein, 25 aa, Artificial sequence
  synthetic peptide
EFQEGLKIFFPGVSEFGKESILFHY

SEQ ID NO: 11557 - protein, 25 aa, Artificial sequence
  synthetic peptide
FQEGLKIFFPGVSEFGKESILFHYT

SEQ ID NO: 11558 - protein, 25 aa, Artificial sequence
  synthetic peptide
QEGLKIFFPGVSEFGKESILFHYTD

SEQ ID NO: 11559 - protein, 25 aa, Artificial sequence
  synthetic peptide
EGLKIFFPGVSEFGKESILFHYTDW

SEQ ID NO: 11560 - protein, 25 aa, Artificial sequence
  synthetic peptide
GLKIFFPGVSEFGKESILFHYTDWV

SEQ ID NO: 11561 - protein, 25 aa, Artificial sequence
  synthetic peptide
LKIFFPGVSEFGKESILFHYTDWVD

SEQ ID NO: 11562 - protein, 25 aa, Artificial sequence
  synthetic peptide
KIFFPGVSEFGKESILFHYTDWVDD

SEQ ID NO: 11563 - protein, 25 aa, Artificial sequence
  synthetic peptide
IFFPGVSEFGKESILFHYTDWVDDQ

SEQ ID NO: 11564 - protein, 25 aa, Artificial sequence
  synthetic peptide
FFPGVSEFGKESILFHYTDWVDDQR

SEQ ID NO: 11565 - protein, 25 aa, Artificial sequence
  synthetic peptide
FPGVSEFGKESILFHYTDWVDDQRP

SEQ ID NO: 11566 - protein, 25 aa, Artificial sequence
  synthetic peptide
PGVSEFGKESILFHYTDWVDDQRPE

SEQ ID NO: 11567 - protein, 25 aa, Artificial sequence
  synthetic peptide
GVSEFGKESILFHYTDWVDDQRPEN

SEQ ID NO: 11568 - protein, 25 aa, Artificial sequence
  synthetic peptide
VSEFGKESILFHYTDWVDDQRPENY

SEQ ID NO: 11569 - protein, 25 aa, Artificial sequence
  synthetic peptide
SEFGKESILFHYTDWVDDQRPENYR

SEQ ID NO: 11570 - protein, 25 aa, Artificial sequence
  synthetic peptide
EFGKESILFHYTDWVDDQRPENYRE

SEQ ID NO: 11571 - protein, 25 aa, Artificial sequence
  synthetic peptide
FGKESILFHYTDWVDDQRPENYREA

SEQ ID NO: 11572 - protein, 25 aa, Artificial sequence
  synthetic peptide
GKESILFHYTDWVDDQRPENYREAL

SEQ ID NO: 11573 - protein, 25 aa, Artificial sequence
  synthetic peptide
KESILFHYTDWVDDQRPENYREALG

SEQ ID NO: 11574 - protein, 25 aa, Artificial sequence
  synthetic peptide
ESILFHYTDWVDDQRPENYREALGD

SEQ ID NO: 11575 - protein, 25 aa, Artificial sequence
  synthetic peptide
SILFHYTDWVDDQRPENYREALGDV

SEQ ID NO: 11576 - protein, 25 aa, Artificial sequence
  synthetic peptide
ILFHYTDWVDDQRPENYREALGDVV

SEQ ID NO: 11577 - protein, 25 aa, Artificial sequence
  synthetic peptide
LFHYTDWVDDQRPENYREALGDVVG

SEQ ID NO: 11578 - protein, 25 aa, Artificial sequence
  synthetic peptide
FHYTDWVDDQRPENYREALGDVVGD

SEQ ID NO: 11579 - protein, 25 aa, Artificial sequence
  synthetic peptide
HYTDWVDDQRPENYREALGDVVGDY

SEQ ID NO: 11580 - protein, 25 aa, Artificial sequence
  synthetic peptide
YTDWVDDQRPENYREALGDVVGDYN

SEQ ID NO: 11581 - protein, 25 aa, Artificial sequence
  synthetic peptide
TDWVDDQRPENYREALGDVVGDYNF

SEQ ID NO: 11582 - protein, 25 aa, Artificial sequence
  synthetic peptide
DWVDDQRPENYREALGDVVGDYNFI

SEQ ID NO: 11583 - protein, 25 aa, Artificial sequence
  synthetic peptide
WVDDQRPENYREALGDVVGDYNFIC

SEQ ID NO: 11584 - protein, 25 aa, Artificial sequence
  synthetic peptide
VDDQRPENYREALGDVVGDYNFICP

SEQ ID NO: 11585 - protein, 25 aa, Artificial sequence
  synthetic peptide
DDQRPENYREALGDVVGDYNFICPA

SEQ ID NO: 11586 - protein, 25 aa, Artificial sequence
  synthetic peptide
DQRPENYREALGDVVGDYNFICPAL

SEQ ID NO: 11587 - protein, 25 aa, Artificial sequence
  synthetic peptide
QRPENYREALGDVVGDYNFICPALE

SEQ ID NO: 11588 - protein, 25 aa, Artificial sequence
  synthetic peptide
RPENYREALGDVVGDYNFICPALEF

SEQ ID NO: 11589 - protein, 25 aa, Artificial sequence
  synthetic peptide
PENYREALGDVVGDYNFICPALEFT

SEQ ID NO: 11590 - protein, 25 aa, Artificial sequence
  synthetic peptide
ENYREALGDVVGDYNFICPALEFTK

SEQ ID NO: 11591 - protein, 25 aa, Artificial sequence
  synthetic peptide
NYREALGDVVGDYNFICPALEFTKK

SEQ ID NO: 11592 - protein, 25 aa, Artificial sequence
  synthetic peptide
YREALGDVVGDYNFICPALEFTKKF

SEQ ID NO: 11593 - protein, 25 aa, Artificial sequence
  synthetic peptide
REALGDVVGDYNFICPALEFTKKFS

SEQ ID NO: 11594 - protein, 25 aa, Artificial sequence
  synthetic peptide
EALGDVVGDYNFICPALEFTKKFSE

SEQ ID NO: 11595 - protein, 25 aa, Artificial sequence
  synthetic peptide
ALGDVVGDYNFICPALEFTKKFSEW

SEQ ID NO: 11596 - protein, 25 aa, Artificial sequence
  synthetic peptide
LGDVVGDYNFICPALEFTKKFSEWG

SEQ ID NO: 11597 - protein, 25 aa, Artificial sequence
  synthetic peptide
GDVVGDYNFICPALEFTKKFSEWGN

SEQ ID NO: 11598 - protein, 25 aa, Artificial sequence
  synthetic peptide
DVVGDYNFICPALEFTKKFSEWGNN

SEQ ID NO: 11599 - protein, 25 aa, Artificial sequence
  synthetic peptide
VVGDYNFICPALEFTKKFSEWGNNA

SEQ ID NO: 11600 - protein, 25 aa, Artificial sequence
  synthetic peptide
VGDYNFICPALEFTKKFSEWGNNAF

SEQ ID NO: 11601 - protein, 25 aa, Artificial sequence
  synthetic peptide
GDYNFICPALEFTKKFSEWGNNAFF

SEQ ID NO: 11602 - protein, 25 aa, Artificial sequence
  synthetic peptide
DYNFICPALEFTKKFSEWGNNAFFY

SEQ ID NO: 11603 - protein, 25 aa, Artificial sequence
  synthetic peptide
YNFICPALEFTKKFSEWGNNAFFYY

SEQ ID NO: 11604 - protein, 25 aa, Artificial sequence
  synthetic peptide
NFICPALEFTKKFSEWGNNAFFYYF

SEQ ID NO: 11605 - protein, 25 aa, Artificial sequence
  synthetic peptide
FICPALEFTKKFSEWGNNAFFYYFE

SEQ ID NO: 11606 - protein, 25 aa, Artificial sequence
  synthetic peptide
ICPALEFTKKFSEWGNNAFFYYFEH

SEQ ID NO: 11607 - protein, 25 aa, Artificial sequence
  synthetic peptide
CPALEFTKKFSEWGNNAFFYYFEHR

SEQ ID NO: 11608 - protein, 25 aa, Artificial sequence
  synthetic peptide
PALEFTKKFSEWGNNAFFYYFEHRS

SEQ ID NO: 11609 - protein, 25 aa, Artificial sequence
  synthetic peptide
ALEFTKKFSEWGNNAFFYYFEHRSS

SEQ ID NO: 11610 - protein, 25 aa, Artificial sequence
  synthetic peptide
LEFTKKFSEWGNNAFFYYFEHRSSK

SEQ ID NO: 11611 - protein, 25 aa, Artificial sequence
  synthetic peptide
EFTKKFSEWGNNAFFYYFEHRSSKL

SEQ ID NO: 11612 - protein, 25 aa, Artificial sequence
  synthetic peptide
FTKKFSEWGNNAFFYYFEHRSSKLP

SEQ ID NO: 11613 - protein, 25 aa, Artificial sequence
  synthetic peptide
TKKFSEWGNNAFFYYFEHRSSKLPW

SEQ ID NO: 11614 - protein, 25 aa, Artificial sequence
  synthetic peptide
KKFSEWGNNAFFYYFEHRSSKLPWP

SEQ ID NO: 11615 - protein, 25 aa, Artificial sequence
  synthetic peptide
KFSEWGNNAFFYYFEHRSSKLPWPE

SEQ ID NO: 11616 - protein, 25 aa, Artificial sequence
  synthetic peptide
FSEWGNNAFFYYFEHRSSKLPWPEW

SEQ ID NO: 11617 - protein, 25 aa, Artificial sequence
  synthetic peptide
SEWGNNAFFYYFEHRSSKLPWPEWM

SEQ ID NO: 11618 - protein, 25 aa, Artificial sequence
  synthetic peptide
EWGNNAFFYYFEHRSSKLPWPEWMG

SEQ ID NO: 11619 - protein, 25 aa, Artificial sequence
  synthetic peptide
WGNNAFFYYFEHRSSKLPWPEWMGV

SEQ ID NO: 11620 - protein, 25 aa, Artificial sequence
  synthetic peptide
GNNAFFYYFEHRSSKLPWPEWMGVM

SEQ ID NO: 11621 - protein, 25 aa, Artificial sequence
  synthetic peptide
NNAFFYYFEHRSSKLPWPEWMGVMH

SEQ ID NO: 11622 - protein, 25 aa, Artificial sequence
  synthetic peptide
NAFFYYFEHRSSKLPWPEWMGVMHG

SEQ ID NO: 11623 - protein, 25 aa, Artificial sequence
  synthetic peptide
AFFYYFEHRSSKLPWPEWMGVMHGY

SEQ ID NO: 11624 - protein, 25 aa, Artificial sequence
  synthetic peptide
FFYYFEHRSSKLPWPEWMGVMHGYE

SEQ ID NO: 11625 - protein, 25 aa, Artificial sequence
  synthetic peptide
FYYFEHRSSKLPWPEWMGVMHGYEI

SEQ ID NO: 11626 - protein, 25 aa, Artificial sequence
  synthetic peptide
YYFEHRSSKLPWPEWMGVMHGYEIE

SEQ ID NO: 11627 - protein, 25 aa, Artificial sequence
  synthetic peptide
YFEHRSSKLPWPEWMGVMHGYEIEF

SEQ ID NO: 11628 - protein, 25 aa, Artificial sequence
  synthetic peptide
FEHRSSKLPWPEWMGVMHGYEIEFV

SEQ ID NO: 11629 - protein, 25 aa, Artificial sequence
  synthetic peptide
EHRSSKLPWPEWMGVMHGYEIEFVF

SEQ ID NO: 11630 - protein, 25 aa, Artificial sequence
  synthetic peptide
HRSSKLPWPEWMGVMHGYEIEFVFG

SEQ ID NO: 11631 - protein, 25 aa, Artificial sequence
  synthetic peptide
RSSKLPWPEWMGVMHGYEIEFVFGL

SEQ ID NO: 11632 - protein, 25 aa, Artificial sequence
  synthetic peptide
SSKLPWPEWMGVMHGYEIEFVFGLP

SEQ ID NO: 11633 - protein, 25 aa, Artificial sequence
  synthetic peptide
SKLPWPEWMGVMHGYEIEFVFGLPL

SEQ ID NO: 11634 - protein, 25 aa, Artificial sequence
  synthetic peptide
KLPWPEWMGVMHGYEIEFVFGLPLE

SEQ ID NO: 11635 - protein, 25 aa, Artificial sequence
  synthetic peptide
LPWPEWMGVMHGYEIEFVFGLPLER

SEQ ID NO: 11636 - protein, 25 aa, Artificial sequence
  synthetic peptide
PWPEWMGVMHGYEIEFVFGLPLERR

SEQ ID NO: 11637 - protein, 25 aa, Artificial sequence
  synthetic peptide
WPEWMGVMHGYEIEFVFGLPLERRD

SEQ ID NO: 11638 - protein, 25 aa, Artificial sequence
  synthetic peptide
PEWMGVMHGYEIEFVFGLPLERRDN

SEQ ID NO: 11639 - protein, 25 aa, Artificial sequence
  synthetic peptide
EWMGVMHGYEIEFVFGLPLERRDNY

SEQ ID NO: 11640 - protein, 25 aa, Artificial sequence
  synthetic peptide
WMGVMHGYEIEFVFGLPLERRDNYT

SEQ ID NO: 11641 - protein, 25 aa, Artificial sequence
  synthetic peptide
MGVMHGYEIEFVFGLPLERRDNYTK

SEQ ID NO: 11642 - protein, 25 aa, Artificial sequence
  synthetic peptide
GVMHGYEIEFVFGLPLERRDNYTKA

SEQ ID NO: 11643 - protein, 25 aa, Artificial sequence
  synthetic peptide
VMHGYEIEFVFGLPLERRDNYTKAE

SEQ ID NO: 11644 - protein, 25 aa, Artificial sequence
  synthetic peptide
MHGYEIEFVFGLPLERRDNYTKAEE

SEQ ID NO: 11645 - protein, 25 aa, Artificial sequence
  synthetic peptide
HGYEIEFVFGLPLERRDNYTKAEEI

SEQ ID NO: 11646 - protein, 25 aa, Artificial sequence
  synthetic peptide
GYEIEFVFGLPLERRDNYTKAEEIL

SEQ ID NO: 11647 - protein, 25 aa, Artificial sequence
  synthetic peptide
YEIEFVFGLPLERRDNYTKAEEILS

SEQ ID NO: 11648 - protein, 25 aa, Artificial sequence
  synthetic peptide
EIEFVFGLPLERRDNYTKAEEILSR

SEQ ID NO: 11649 - protein, 25 aa, Artificial sequence
  synthetic peptide
IEFVFGLPLERRDNYTKAEEILSRS

SEQ ID NO: 11650 - protein, 25 aa, Artificial sequence
  synthetic peptide
EFVFGLPLERRDNYTKAEEILSRSI

SEQ ID NO: 11651 - protein, 25 aa, Artificial sequence
  synthetic peptide
FVFGLPLERRDNYTKAEEILSRSIV

SEQ ID NO: 11652 - protein, 25 aa, Artificial sequence
  synthetic peptide
VFGLPLERRDNYTKAEEILSRSIVK

SEQ ID NO: 11653 - protein, 25 aa, Artificial sequence
  synthetic peptide
FGLPLERRDNYTKAEEILSRSIVKR

SEQ ID NO: 11654 - protein, 25 aa, Artificial sequence
  synthetic peptide
GLPLERRDNYTKAEEILSRSIVKRW

SEQ ID NO: 11655 - protein, 25 aa, Artificial sequence
  synthetic peptide
LPLERRDNYTKAEEILSRSIVKRWA

SEQ ID NO: 11656 - protein, 25 aa, Artificial sequence
  synthetic peptide
PLERRDNYTKAEEILSRSIVKRWAN

SEQ ID NO: 11657 - protein, 25 aa, Artificial sequence
  synthetic peptide
LERRDNYTKAEEILSRSIVKRWANF

SEQ ID NO: 11658 - protein, 25 aa, Artificial sequence
  synthetic peptide
ERRDNYTKAEEILSRSIVKRWANFA

SEQ ID NO: 11659 - protein, 25 aa, Artificial sequence
  synthetic peptide
RRDNYTKAEEILSRSIVKRWANFAK

SEQ ID NO: 11660 - protein, 25 aa, Artificial sequence
  synthetic peptide
RDNYTKAEEILSRSIVKRWANFAKY

SEQ ID NO: 11661 - protein, 25 aa, Artificial sequence
  synthetic peptide
DNYTKAEEILSRSIVKRWANFAKYG

SEQ ID NO: 11662 - protein, 25 aa, Artificial sequence
  synthetic peptide
NYTKAEEILSRSIVKRWANFAKYGN

SEQ ID NO: 11663 - protein, 25 aa, Artificial sequence
  synthetic peptide
YTKAEEILSRSIVKRWANFAKYGNP

SEQ ID NO: 11664 - protein, 25 aa, Artificial sequence
  synthetic peptide
TKAEEILSRSIVKRWANFAKYGNPN

SEQ ID NO: 11665 - protein, 25 aa, Artificial sequence
  synthetic peptide
KAEEILSRSIVKRWANFAKYGNPNE

SEQ ID NO: 11666 - protein, 25 aa, Artificial sequence
  synthetic peptide
AEEILSRSIVKRWANFAKYGNPNET

SEQ ID NO: 11667 - protein, 25 aa, Artificial sequence
  synthetic peptide
EEILSRSIVKRWANFAKYGNPNETQ

SEQ ID NO: 11668 - protein, 25 aa, Artificial sequence
  synthetic peptide
EILSRSIVKRWANFAKYGNPNETQN

SEQ ID NO: 11669 - protein, 25 aa, Artificial sequence
  synthetic peptide
ILSRSIVKRWANFAKYGNPNETQNN

SEQ ID NO: 11670 - protein, 25 aa, Artificial sequence
  synthetic peptide
LSRSIVKRWANFAKYGNPNETQNNS

SEQ ID NO: 11671 - protein, 25 aa, Artificial sequence
  synthetic peptide
SRSIVKRWANFAKYGNPNETQNNST

SEQ ID NO: 11672 - protein, 25 aa, Artificial sequence
  synthetic peptide
RSIVKRWANFAKYGNPNETQNNSTS

SEQ ID NO: 11673 - protein, 25 aa, Artificial sequence
  synthetic peptide
SIVKRWANFAKYGNPNETQNNSTSW

SEQ ID NO: 11674 - protein, 25 aa, Artificial sequence
  synthetic peptide
IVKRWANFAKYGNPNETQNNSTSWP

SEQ ID NO: 11675 - protein, 25 aa, Artificial sequence
  synthetic peptide
VKRWANFAKYGNPNETQNNSTSWPV

SEQ ID NO: 11676 - protein, 25 aa, Artificial sequence
  synthetic peptide
KRWANFAKYGNPNETQNNSTSWPVF

SEQ ID NO: 11677 - protein, 25 aa, Artificial sequence
  synthetic peptide
RWANFAKYGNPNETQNNSTSWPVFK

SEQ ID NO: 11678 - protein, 25 aa, Artificial sequence
  synthetic peptide
WANFAKYGNPNETQNNSTSWPVFKS

SEQ ID NO: 11679 - protein, 25 aa, Artificial sequence
  synthetic peptide
ANFAKYGNPNETQNNSTSWPVFKST

SEQ ID NO: 11680 - protein, 25 aa, Artificial sequence
  synthetic peptide
NFAKYGNPNETQNNSTSWPVFKSTE

SEQ ID NO: 11681 - protein, 25 aa, Artificial sequence
  synthetic peptide
FAKYGNPNETQNNSTSWPVFKSTEQ

SEQ ID NO: 11682 - protein, 25 aa, Artificial sequence
  synthetic peptide
AKYGNPNETQNNSTSWPVFKSTEQK

SEQ ID NO: 11683 - protein, 25 aa, Artificial sequence
  synthetic peptide
KYGNPNETQNNSTSWPVFKSTEQKY

SEQ ID NO: 11684 - protein, 25 aa, Artificial sequence
  synthetic peptide
YGNPNETQNNSTSWPVFKSTEQKYL

SEQ ID NO: 11685 - protein, 25 aa, Artificial sequence
  synthetic peptide
GNPNETQNNSTSWPVFKSTEQKYLT

SEQ ID NO: 11686 - protein, 25 aa, Artificial sequence
  synthetic peptide
NPNETQNNSTSWPVFKSTEQKYLTL

SEQ ID NO: 11687 - protein, 25 aa, Artificial sequence
  synthetic peptide
PNETQNNSTSWPVFKSTEQKYLTLN

SEQ ID NO: 11688 - protein, 25 aa, Artificial sequence
  synthetic peptide
NETQNNSTSWPVFKSTEQKYLTLNT

SEQ ID NO: 11689 - protein, 25 aa, Artificial sequence
  synthetic peptide
ETQNNSTSWPVFKSTEQKYLTLNTE

SEQ ID NO: 11690 - protein, 25 aa, Artificial sequence
  synthetic peptide
TQNNSTSWPVFKSTEQKYLTLNTES

SEQ ID NO: 11691 - protein, 25 aa, Artificial sequence
  synthetic peptide
QNNSTSWPVFKSTEQKYLTLNTEST

SEQ ID NO: 11692 - protein, 25 aa, Artificial sequence
  synthetic peptide
NNSTSWPVFKSTEQKYLTLNTESTR

SEQ ID NO: 11693 - protein, 25 aa, Artificial sequence
  synthetic peptide
NSTSWPVFKSTEQKYLTLNTESTRI

SEQ ID NO: 11694 - protein, 25 aa, Artificial sequence
  synthetic peptide
STSWPVFKSTEQKYLTLNTESTRIM

SEQ ID NO: 11695 - protein, 25 aa, Artificial sequence
  synthetic peptide
TSWPVFKSTEQKYLTLNTESTRIMT

SEQ ID NO: 11696 - protein, 25 aa, Artificial sequence
  synthetic peptide
SWPVFKSTEQKYLTLNTESTRIMTK

SEQ ID NO: 11697 - protein, 25 aa, Artificial sequence
  synthetic peptide
WPVFKSTEQKYLTLNTESTRIMTKL

SEQ ID NO: 11698 - protein, 25 aa, Artificial sequence
  synthetic peptide
PVFKSTEQKYLTLNTESTRIMTKLR

SEQ ID NO: 11699 - protein, 25 aa, Artificial sequence
  synthetic peptide
VFKSTEQKYLTLNTESTRIMTKLRA

SEQ ID NO: 11700 - protein, 25 aa, Artificial sequence
  synthetic peptide
FKSTEQKYLTLNTESTRIMTKLRAQ

SEQ ID NO: 11701 - protein, 25 aa, Artificial sequence
  synthetic peptide
KSTEQKYLTLNTESTRIMTKLRAQQ

SEQ ID NO: 11702 - protein, 25 aa, Artificial sequence
  synthetic peptide
STEQKYLTLNTESTRIMTKLRAQQC

SEQ ID NO: 11703 - protein, 25 aa, Artificial sequence
  synthetic peptide
TEQKYLTLNTESTRIMTKLRAQQCR

SEQ ID NO: 11704 - protein, 25 aa, Artificial sequence
  synthetic peptide
EQKYLTLNTESTRIMTKLRAQQCRF

SEQ ID NO: 11705 - protein, 25 aa, Artificial sequence
  synthetic peptide
QKYLTLNTESTRIMTKLRAQQCRFW

SEQ ID NO: 11706 - protein, 25 aa, Artificial sequence
  synthetic peptide
KYLTLNTESTRIMTKLRAQQCRFWT

SEQ ID NO: 11707 - protein, 25 aa, Artificial sequence
  synthetic peptide
YLTLNTESTRIMTKLRAQQCRFWTS

SEQ ID NO: 11708 - protein, 25 aa, Artificial sequence
  synthetic peptide
LTLNTESTRIMTKLRAQQCRFWTSF

SEQ ID NO: 11709 - protein, 25 aa, Artificial sequence
  synthetic peptide
TLNTESTRIMTKLRAQQCRFWTSFF

SEQ ID NO: 11710 - protein, 25 aa, Artificial sequence
  synthetic peptide
LNTESTRIMTKLRAQQCRFWTSFFP

SEQ ID NO: 11711 - protein, 25 aa, Artificial sequence
  synthetic peptide
NTESTRIMTKLRAQQCRFWTSFFPK

SEQ ID NO: 11712 - protein, 25 aa, Artificial sequence
  synthetic peptide
TESTRIMTKLRAQQCRFWTSFFPKV

SEQ ID NO: 11713 - protein, 25 aa, Artificial sequence
  synthetic peptide
ESTRIMTKLRAQQCRFWTSFFPKVL

SEQ ID NO: 11714 - protein, 25 aa, Artificial sequence
  synthetic peptide
STRIMTKLRAQQCRFWTSFFPKVLE

SEQ ID NO: 11715 - protein, 25 aa, Artificial sequence
  synthetic peptide
TRIMTKLRAQQCRFWTSFFPKVLEM

SEQ ID NO: 11716 - protein, 25 aa, Artificial sequence
  synthetic peptide
RIMTKLRAQQCRFWTSFFPKVLEMT

SEQ ID NO: 11717 - protein, 25 aa, Artificial sequence
  synthetic peptide
IMTKLRAQQCRFWTSFFPKVLEMTG

SEQ ID NO: 11718 - protein, 25 aa, Artificial sequence
  synthetic peptide
MTKLRAQQCRFWTSFFPKVLEMTGN

SEQ ID NO: 11719 - protein, 25 aa, Artificial sequence
  synthetic peptide
TKLRAQQCRFWTSFFPKVLEMTGNI

SEQ ID NO: 11720 - protein, 25 aa, Artificial sequence
  synthetic peptide
KLRAQQCRFWTSFFPKVLEMTGNID

SEQ ID NO: 11721 - protein, 25 aa, Artificial sequence
  synthetic peptide
LRAQQCRFWTSFFPKVLEMTGNIDE

SEQ ID NO: 11722 - protein, 25 aa, Artificial sequence
  synthetic peptide
RAQQCRFWTSFFPKVLEMTGNIDEA

SEQ ID NO: 11723 - protein, 25 aa, Artificial sequence
  synthetic peptide
AQQCRFWTSFFPKVLEMTGNIDEAE

SEQ ID NO: 11724 - protein, 25 aa, Artificial sequence
  synthetic peptide
QQCRFWTSFFPKVLEMTGNIDEAEW

SEQ ID NO: 11725 - protein, 25 aa, Artificial sequence
  synthetic peptide
QCRFWTSFFPKVLEMTGNIDEAEWE

SEQ ID NO: 11726 - protein, 25 aa, Artificial sequence
  synthetic peptide
CRFWTSFFPKVLEMTGNIDEAEWEW

SEQ ID NO: 11727 - protein, 25 aa, Artificial sequence
  synthetic peptide
RFWTSFFPKVLEMTGNIDEAEWEWK

SEQ ID NO: 11728 - protein, 25 aa, Artificial sequence
  synthetic peptide
FWTSFFPKVLEMTGNIDEAEWEWKA

SEQ ID NO: 11729 - protein, 25 aa, Artificial sequence
  synthetic peptide
WTSFFPKVLEMTGNIDEAEWEWKAG

SEQ ID NO: 11730 - protein, 25 aa, Artificial sequence
  synthetic peptide
TSFFPKVLEMTGNIDEAEWEWKAGF

SEQ ID NO: 11731 - protein, 25 aa, Artificial sequence
  synthetic peptide
SFFPKVLEMTGNIDEAEWEWKAGFH

SEQ ID NO: 11732 - protein, 25 aa, Artificial sequence
  synthetic peptide
FFPKVLEMTGNIDEAEWEWKAGFHR

SEQ ID NO: 11733 - protein, 25 aa, Artificial sequence
  synthetic peptide
FPKVLEMTGNIDEAEWEWKAGFHRW

SEQ ID NO: 11734 - protein, 25 aa, Artificial sequence
  synthetic peptide
PKVLEMTGNIDEAEWEWKAGFHRWN

SEQ ID NO: 11735 - protein, 25 aa, Artificial sequence
  synthetic peptide
KVLEMTGNIDEAEWEWKAGFHRWNN

SEQ ID NO: 11736 - protein, 25 aa, Artificial sequence
  synthetic peptide
VLEMTGNIDEAEWEWKAGFHRWNNY

SEQ ID NO: 11737 - protein, 25 aa, Artificial sequence
  synthetic peptide
LEMTGNIDEAEWEWKAGFHRWNNYM

SEQ ID NO: 11738 - protein, 25 aa, Artificial sequence
  synthetic peptide
EMTGNIDEAEWEWKAGFHRWNNYMM

SEQ ID NO: 11739 - protein, 25 aa, Artificial sequence
  synthetic peptide
MTGNIDEAEWEWKAGFHRWNNYMMD

SEQ ID NO: 11740 - protein, 25 aa, Artificial sequence
  synthetic peptide
TGNIDEAEWEWKAGFHRWNNYMMDW

SEQ ID NO: 11741 - protein, 25 aa, Artificial sequence
  synthetic peptide
GNIDEAEWEWKAGFHRWNNYMMDWK

SEQ ID NO: 11742 - protein, 25 aa, Artificial sequence
  synthetic peptide
NIDEAEWEWKAGFHRWNNYMMDWKN

SEQ ID NO: 11743 - protein, 25 aa, Artificial sequence
  synthetic peptide
IDEAEWEWKAGFHRWNNYMMDWKNQ

SEQ ID NO: 11744 - protein, 25 aa, Artificial sequence
  synthetic peptide
DEAEWEWKAGFHRWNNYMMDWKNQF

SEQ ID NO: 11745 - protein, 25 aa, Artificial sequence
  synthetic peptide
EAEWEWKAGFHRWNNYMMDWKNQFN

SEQ ID NO: 11746 - protein, 25 aa, Artificial sequence
  synthetic peptide
AEWEWKAGFHRWNNYMMDWKNQFND

SEQ ID NO: 11747 - protein, 25 aa, Artificial sequence
  synthetic peptide
EWEWKAGFHRWNNYMMDWKNQFNDY

SEQ ID NO: 11748 - protein, 25 aa, Artificial sequence
  synthetic peptide
WEWKAGFHRWNNYMMDWKNQFNDYT

SEQ ID NO: 11749 - protein, 25 aa, Artificial sequence
  synthetic peptide
EWKAGFHRWNNYMMDWKNQFNDYTS

SEQ ID NO: 11750 - protein, 25 aa, Artificial sequence
  synthetic peptide
WKAGFHRWNNYMMDWKNQFNDYTSK

SEQ ID NO: 11751 - protein, 25 aa, Artificial sequence
  synthetic peptide
KAGFHRWNNYMMDWKNQFNDYTSKK

SEQ ID NO: 11752 - protein, 25 aa, Artificial sequence
  synthetic peptide
AGFHRWNNYMMDWKNQFNDYTSKKE

SEQ ID NO: 11753 - protein, 25 aa, Artificial sequence
  synthetic peptide
GFHRWNNYMMDWKNQFNDYTSKKES

SEQ ID NO: 11754 - protein, 25 aa, Artificial sequence
  synthetic peptide
FHRWNNYMMDWKNQFNDYTSKKESC

SEQ ID NO: 11755 - protein, 25 aa, Artificial sequence
  synthetic peptide
HRWNNYMMDWKNQFNDYTSKKESCV

SEQ ID NO: 11756 - protein, 25 aa, Artificial sequence
  synthetic peptide
RWNNYMMDWKNQFNDYTSKKESCVG

SEQ ID NO: 11757 - protein, 25 aa, Artificial sequence
  synthetic peptide
WNNYMMDWKNQFNDYTSKKESCVGL

SEQ ID NO: 11758 - protein, 26 aa, Artificial sequence
  synthetic peptide
MHSKVTIICIRFLFWFLLLCMLIGKS

SEQ ID NO: 11759 - protein, 26 aa, Artificial sequence
  synthetic peptide
HSKVTIICIRFLFWFLLLCMLIGKSH

SEQ ID NO: 11760 - protein, 26 aa, Artificial sequence
  synthetic peptide
SKVTIICIRFLFWFLLLCMLIGKSHT

SEQ ID NO: 11761 - protein, 26 aa, Artificial sequence
  synthetic peptide
KVTIICIRFLFWFLLLCMLIGKSHTE

SEQ ID NO: 11762 - protein, 26 aa, Artificial sequence
  synthetic peptide
VTIICIRFLFWFLLLCMLIGKSHTED

SEQ ID NO: 11763 - protein, 26 aa, Artificial sequence
  synthetic peptide
TIICIRFLFWFLLLCMLIGKSHTEDD

SEQ ID NO: 11764 - protein, 26 aa, Artificial sequence
  synthetic peptide
IICIRFLFWFLLLCMLIGKSHTEDDI

SEQ ID NO: 11765 - protein, 26 aa, Artificial sequence
  synthetic peptide
ICIRFLFWFLLLCMLIGKSHTEDDII

SEQ ID NO: 11766 - protein, 26 aa, Artificial sequence
  synthetic peptide
CIRFLFWFLLLCMLIGKSHTEDDIII

SEQ ID NO: 11767 - protein, 26 aa, Artificial sequence
  synthetic peptide
IRFLFWFLLLCMLIGKSHTEDDIIIA

SEQ ID NO: 11768 - protein, 26 aa, Artificial sequence
  synthetic peptide
RFLFWFLLLCMLIGKSHTEDDIIIAT

SEQ ID NO: 11769 - protein, 26 aa, Artificial sequence
  synthetic peptide
FLFWFLLLCMLIGKSHTEDDIIIATK

SEQ ID NO: 11770 - protein, 26 aa, Artificial sequence
  synthetic peptide
LFWFLLLCMLIGKSHTEDDIIIATKN

SEQ ID NO: 11771 - protein, 26 aa, Artificial sequence
  synthetic peptide
FWFLLLCMLIGKSHTEDDIIIATKNG

SEQ ID NO: 11772 - protein, 26 aa, Artificial sequence
  synthetic peptide
WFLLLCMLIGKSHTEDDIIIATKNGK

SEQ ID NO: 11773 - protein, 26 aa, Artificial sequence
  synthetic peptide
FLLLCMLIGKSHTEDDIIIATKNGKV

SEQ ID NO: 11774 - protein, 26 aa, Artificial sequence
  synthetic peptide
LLLCMLIGKSHTEDDIIIATKNGKVR

SEQ ID NO: 11775 - protein, 26 aa, Artificial sequence
  synthetic peptide
LLCMLIGKSHTEDDIIIATKNGKVRG

SEQ ID NO: 11776 - protein, 26 aa, Artificial sequence
  synthetic peptide
LCMLIGKSHTEDDIIIATKNGKVRGM

SEQ ID NO: 11777 - protein, 26 aa, Artificial sequence
  synthetic peptide
CMLIGKSHTEDDIIIATKNGKVRGMN

SEQ ID NO: 11778 - protein, 26 aa, Artificial sequence
  synthetic peptide
MLIGKSHTEDDIIIATKNGKVRGMNL

SEQ ID NO: 11779 - protein, 26 aa, Artificial sequence
  synthetic peptide
LIGKSHTEDDIIIATKNGKVRGMNLT

SEQ ID NO: 11780 - protein, 26 aa, Artificial sequence
  synthetic peptide
IGKSHTEDDIIIATKNGKVRGMNLTV

SEQ ID NO: 11781 - protein, 26 aa, Artificial sequence
  synthetic peptide
GKSHTEDDIIIATKNGKVRGMNLTVF

SEQ ID NO: 11782 - protein, 26 aa, Artificial sequence
  synthetic peptide
KSHTEDDIIIATKNGKVRGMNLTVFG

SEQ ID NO: 11783 - protein, 26 aa, Artificial sequence
  synthetic peptide
SHTEDDIIIATKNGKVRGMNLTVFGG

SEQ ID NO: 11784 - protein, 26 aa, Artificial sequence
  synthetic peptide
HTEDDIIIATKNGKVRGMNLTVFGGT

SEQ ID NO: 11785 - protein, 26 aa, Artificial sequence
  synthetic peptide
TEDDIIIATKNGKVRGMNLTVFGGTV

SEQ ID NO: 11786 - protein, 26 aa, Artificial sequence
  synthetic peptide
EDDIIIATKNGKVRGMNLTVFGGTVT

SEQ ID NO: 11787 - protein, 26 aa, Artificial sequence
  synthetic peptide
DDIIIATKNGKVRGMNLTVFGGTVTA

SEQ ID NO: 11788 - protein, 26 aa, Artificial sequence
  synthetic peptide
DIIIATKNGKVRGMNLTVFGGTVTAF

SEQ ID NO: 11789 - protein, 26 aa, Artificial sequence
  synthetic peptide
IIIATKNGKVRGMNLTVFGGTVTAFL

SEQ ID NO: 11790 - protein, 26 aa, Artificial sequence
  synthetic peptide
IIATKNGKVRGMNLTVFGGTVTAFLG

SEQ ID NO: 11791 - protein, 26 aa, Artificial sequence
  synthetic peptide
IATKNGKVRGMNLTVFGGTVTAFLGI

SEQ ID NO: 11792 - protein, 26 aa, Artificial sequence
  synthetic peptide
ATKNGKVRGMNLTVFGGTVTAFLGIP

SEQ ID NO: 11793 - protein, 26 aa, Artificial sequence
  synthetic peptide
TKNGKVRGMNLTVFGGTVTAFLGIPY

SEQ ID NO: 11794 - protein, 26 aa, Artificial sequence
  synthetic peptide
KNGKVRGMNLTVFGGTVTAFLGIPYA

SEQ ID NO: 11795 - protein, 26 aa, Artificial sequence
  synthetic peptide
NGKVRGMNLTVFGGTVTAFLGIPYAQ

SEQ ID NO: 11796 - protein, 26 aa, Artificial sequence
  synthetic peptide
GKVRGMNLTVFGGTVTAFLGIPYAQP

SEQ ID NO: 11797 - protein, 26 aa, Artificial sequence
  synthetic peptide
KVRGMNLTVFGGTVTAFLGIPYAQPP

SEQ ID NO: 11798 - protein, 26 aa, Artificial sequence
  synthetic peptide
VRGMNLTVFGGTVTAFLGIPYAQPPL

SEQ ID NO: 11799 - protein, 26 aa, Artificial sequence
  synthetic peptide
RGMNLTVFGGTVTAFLGIPYAQPPLG

SEQ ID NO: 11800 - protein, 26 aa, Artificial sequence
  synthetic peptide
GMNLTVFGGTVTAFLGIPYAQPPLGR

SEQ ID NO: 11801 - protein, 26 aa, Artificial sequence
  synthetic peptide
MNLTVFGGTVTAFLGIPYAQPPLGRL

SEQ ID NO: 11802 - protein, 26 aa, Artificial sequence
  synthetic peptide
NLTVFGGTVTAFLGIPYAQPPLGRLR

SEQ ID NO: 11803 - protein, 26 aa, Artificial sequence
  synthetic peptide
LTVFGGTVTAFLGIPYAQPPLGRLRF

SEQ ID NO: 11804 - protein, 26 aa, Artificial sequence
  synthetic peptide
TVFGGTVTAFLGIPYAQPPLGRLRFK

SEQ ID NO: 11805 - protein, 26 aa, Artificial sequence
  synthetic peptide
VFGGTVTAFLGIPYAQPPLGRLRFKK

SEQ ID NO: 11806 - protein, 26 aa, Artificial sequence
  synthetic peptide
FGGTVTAFLGIPYAQPPLGRLRFKKP

SEQ ID NO: 11807 - protein, 26 aa, Artificial sequence
  synthetic peptide
GGTVTAFLGIPYAQPPLGRLRFKKPQ

SEQ ID NO: 11808 - protein, 26 aa, Artificial sequence
  synthetic peptide
GTVTAFLGIPYAQPPLGRLRFKKPQS

SEQ ID NO: 11809 - protein, 26 aa, Artificial sequence
  synthetic peptide
TVTAFLGIPYAQPPLGRLRFKKPQSL

SEQ ID NO: 11810 - protein, 26 aa, Artificial sequence
  synthetic peptide
VTAFLGIPYAQPPLGRLRFKKPQSLT

SEQ ID NO: 11811 - protein, 26 aa, Artificial sequence
  synthetic peptide
TAFLGIPYAQPPLGRLRFKKPQSLTK

SEQ ID NO: 11812 - protein, 26 aa, Artificial sequence
  synthetic peptide
AFLGIPYAQPPLGRLRFKKPQSLTKW

SEQ ID NO: 11813 - protein, 26 aa, Artificial sequence
  synthetic peptide
FLGIPYAQPPLGRLRFKKPQSLTKWS

SEQ ID NO: 11814 - protein, 26 aa, Artificial sequence
  synthetic peptide
LGIPYAQPPLGRLRFKKPQSLTKWSD

SEQ ID NO: 11815 - protein, 26 aa, Artificial sequence
  synthetic peptide
GIPYAQPPLGRLRFKKPQSLTKWSDI

SEQ ID NO: 11816 - protein, 26 aa, Artificial sequence
  synthetic peptide
IPYAQPPLGRLRFKKPQSLTKWSDIW

SEQ ID NO: 11817 - protein, 26 aa, Artificial sequence
  synthetic peptide
PYAQPPLGRLRFKKPQSLTKWSDIWN

SEQ ID NO: 11818 - protein, 26 aa, Artificial sequence
  synthetic peptide
YAQPPLGRLRFKKPQSLTKWSDIWNA

SEQ ID NO: 11819 - protein, 26 aa, Artificial sequence
  synthetic peptide
AQPPLGRLRFKKPQSLTKWSDIWNAT

SEQ ID NO: 11820 - protein, 26 aa, Artificial sequence
  synthetic peptide
QPPLGRLRFKKPQSLTKWSDIWNATK

SEQ ID NO: 11821 - protein, 26 aa, Artificial sequence
  synthetic peptide
PPLGRLRFKKPQSLTKWSDIWNATKY

SEQ ID NO: 11822 - protein, 26 aa, Artificial sequence
  synthetic peptide
PLGRLRFKKPQSLTKWSDIWNATKYA

SEQ ID NO: 11823 - protein, 26 aa, Artificial sequence
  synthetic peptide
LGRLRFKKPQSLTKWSDIWNATKYAN

SEQ ID NO: 11824 - protein, 26 aa, Artificial sequence
  synthetic peptide
GRLRFKKPQSLTKWSDIWNATKYANS

SEQ ID NO: 11825 - protein, 26 aa, Artificial sequence
  synthetic peptide
RLRFKKPQSLTKWSDIWNATKYANSC

SEQ ID NO: 11826 - protein, 26 aa, Artificial sequence
  synthetic peptide
LRFKKPQSLTKWSDIWNATKYANSCC

SEQ ID NO: 11827 - protein, 26 aa, Artificial sequence
  synthetic peptide
RFKKPQSLTKWSDIWNATKYANSCCQ

SEQ ID NO: 11828 - protein, 26 aa, Artificial sequence
  synthetic peptide
FKKPQSLTKWSDIWNATKYANSCCQN

SEQ ID NO: 11829 - protein, 26 aa, Artificial sequence
  synthetic peptide
KKPQSLTKWSDIWNATKYANSCCQNI

SEQ ID NO: 11830 - protein, 26 aa, Artificial sequence
  synthetic peptide
KPQSLTKWSDIWNATKYANSCCQNID

SEQ ID NO: 11831 - protein, 26 aa, Artificial sequence
  synthetic peptide
PQSLTKWSDIWNATKYANSCCQNIDQ

SEQ ID NO: 11832 - protein, 26 aa, Artificial sequence
  synthetic peptide
QSLTKWSDIWNATKYANSCCQNIDQS

SEQ ID NO: 11833 - protein, 26 aa, Artificial sequence
  synthetic peptide
SLTKWSDIWNATKYANSCCQNIDQSF

SEQ ID NO: 11834 - protein, 26 aa, Artificial sequence
  synthetic peptide
LTKWSDIWNATKYANSCCQNIDQSFP

SEQ ID NO: 11835 - protein, 26 aa, Artificial sequence
  synthetic peptide
TKWSDIWNATKYANSCCQNIDQSFPG

SEQ ID NO: 11836 - protein, 26 aa, Artificial sequence
  synthetic peptide
KWSDIWNATKYANSCCQNIDQSFPGF

SEQ ID NO: 11837 - protein, 26 aa, Artificial sequence
  synthetic peptide
WSDIWNATKYANSCCQNIDQSFPGFH

SEQ ID NO: 11838 - protein, 26 aa, Artificial sequence
  synthetic peptide
SDIWNATKYANSCCQNIDQSFPGFHG

SEQ ID NO: 11839 - protein, 26 aa, Artificial sequence
  synthetic peptide
DIWNATKYANSCCQNIDQSFPGFHGS

SEQ ID NO: 11840 - protein, 26 aa, Artificial sequence
  synthetic peptide
IWNATKYANSCCQNIDQSFPGFHGSE

SEQ ID NO: 11841 - protein, 26 aa, Artificial sequence
  synthetic peptide
WNATKYANSCCQNIDQSFPGFHGSEM

SEQ ID NO: 11842 - protein, 26 aa, Artificial sequence
  synthetic peptide
NATKYANSCCQNIDQSFPGFHGSEMW

SEQ ID NO: 11843 - protein, 26 aa, Artificial sequence
  synthetic peptide
ATKYANSCCQNIDQSFPGFHGSEMWN

SEQ ID NO: 11844 - protein, 26 aa, Artificial sequence
  synthetic peptide
TKYANSCCQNIDQSFPGFHGSEMWNP

SEQ ID NO: 11845 - protein, 26 aa, Artificial sequence
  synthetic peptide
KYANSCCQNIDQSFPGFHGSEMWNPN

SEQ ID NO: 11846 - protein, 26 aa, Artificial sequence
  synthetic peptide
YANSCCQNIDQSFPGFHGSEMWNPNT

SEQ ID NO: 11847 - protein, 26 aa, Artificial sequence
  synthetic peptide
ANSCCQNIDQSFPGFHGSEMWNPNTD

SEQ ID NO: 11848 - protein, 26 aa, Artificial sequence
  synthetic peptide
NSCCQNIDQSFPGFHGSEMWNPNTDL

SEQ ID NO: 11849 - protein, 26 aa, Artificial sequence
  synthetic peptide
SCCQNIDQSFPGFHGSEMWNPNTDLS

SEQ ID NO: 11850 - protein, 26 aa, Artificial sequence
  synthetic peptide
CCQNIDQSFPGFHGSEMWNPNTDLSE

SEQ ID NO: 11851 - protein, 26 aa, Artificial sequence
  synthetic peptide
CQNIDQSFPGFHGSEMWNPNTDLSED

SEQ ID NO: 11852 - protein, 26 aa, Artificial sequence
  synthetic peptide
QNIDQSFPGFHGSEMWNPNTDLSEDC

SEQ ID NO: 11853 - protein, 26 aa, Artificial sequence
  synthetic peptide
NIDQSFPGFHGSEMWNPNTDLSEDCL

SEQ ID NO: 11854 - protein, 26 aa, Artificial sequence
  synthetic peptide
IDQSFPGFHGSEMWNPNTDLSEDCLY

SEQ ID NO: 11855 - protein, 26 aa, Artificial sequence
  synthetic peptide
DQSFPGFHGSEMWNPNTDLSEDCLYL

SEQ ID NO: 11856 - protein, 26 aa, Artificial sequence
  synthetic peptide
QSFPGFHGSEMWNPNTDLSEDCLYLN

SEQ ID NO: 11857 - protein, 26 aa, Artificial sequence
  synthetic peptide
SFPGFHGSEMWNPNTDLSEDCLYLNV

SEQ ID NO: 11858 - protein, 26 aa, Artificial sequence
  synthetic peptide
FPGFHGSEMWNPNTDLSEDCLYLNVW

SEQ ID NO: 11859 - protein, 26 aa, Artificial sequence
  synthetic peptide
PGFHGSEMWNPNTDLSEDCLYLNVWI

SEQ ID NO: 11860 - protein, 26 aa, Artificial sequence
  synthetic peptide
GFHGSEMWNPNTDLSEDCLYLNVWIP

SEQ ID NO: 11861 - protein, 26 aa, Artificial sequence
  synthetic peptide
FHGSEMWNPNTDLSEDCLYLNVWIPA

SEQ ID NO: 11862 - protein, 26 aa, Artificial sequence
  synthetic peptide
HGSEMWNPNTDLSEDCLYLNVWIPAP

SEQ ID NO: 11863 - protein, 26 aa, Artificial sequence
  synthetic peptide
GSEMWNPNTDLSEDCLYLNVWIPAPK

SEQ ID NO: 11864 - protein, 26 aa, Artificial sequence
  synthetic peptide
SEMWNPNTDLSEDCLYLNVWIPAPKP

SEQ ID NO: 11865 - protein, 26 aa, Artificial sequence
  synthetic peptide
EMWNPNTDLSEDCLYLNVWIPAPKPK

SEQ ID NO: 11866 - protein, 26 aa, Artificial sequence
  synthetic peptide
MWNPNTDLSEDCLYLNVWIPAPKPKN

SEQ ID NO: 11867 - protein, 26 aa, Artificial sequence
  synthetic peptide
WNPNTDLSEDCLYLNVWIPAPKPKNA

SEQ ID NO: 11868 - protein, 26 aa, Artificial sequence
  synthetic peptide
NPNTDLSEDCLYLNVWIPAPKPKNAT

SEQ ID NO: 11869 - protein, 26 aa, Artificial sequence
  synthetic peptide
PNTDLSEDCLYLNVWIPAPKPKNATV

SEQ ID NO: 11870 - protein, 26 aa, Artificial sequence
  synthetic peptide
NTDLSEDCLYLNVWIPAPKPKNATVL

SEQ ID NO: 11871 - protein, 26 aa, Artificial sequence
  synthetic peptide
TDLSEDCLYLNVWIPAPKPKNATVLI

SEQ ID NO: 11872 - protein, 26 aa, Artificial sequence
  synthetic peptide
DLSEDCLYLNVWIPAPKPKNATVLIW

SEQ ID NO: 11873 - protein, 26 aa, Artificial sequence
  synthetic peptide
LSEDCLYLNVWIPAPKPKNATVLIWI

SEQ ID NO: 11874 - protein, 26 aa, Artificial sequence
  synthetic peptide
SEDCLYLNVWIPAPKPKNATVLIWIY

SEQ ID NO: 11875 - protein, 26 aa, Artificial sequence
  synthetic peptide
EDCLYLNVWIPAPKPKNATVLIWIYG

SEQ ID NO: 11876 - protein, 26 aa, Artificial sequence
  synthetic peptide
DCLYLNVWIPAPKPKNATVLIWIYGG

SEQ ID NO: 11877 - protein, 26 aa, Artificial sequence
  synthetic peptide
CLYLNVWIPAPKPKNATVLIWIYGGG

SEQ ID NO: 11878 - protein, 26 aa, Artificial sequence
  synthetic peptide
LYLNVWIPAPKPKNATVLIWIYGGGF

SEQ ID NO: 11879 - protein, 26 aa, Artificial sequence
  synthetic peptide
YLNVWIPAPKPKNATVLIWIYGGGFQ

SEQ ID NO: 11880 - protein, 26 aa, Artificial sequence
  synthetic peptide
LNVWIPAPKPKNATVLIWIYGGGFQT

SEQ ID NO: 11881 - protein, 26 aa, Artificial sequence
  synthetic peptide
NVWIPAPKPKNATVLIWIYGGGFQTG

SEQ ID NO: 11882 - protein, 26 aa, Artificial sequence
  synthetic peptide
VWIPAPKPKNATVLIWIYGGGFQTGT

SEQ ID NO: 11883 - protein, 26 aa, Artificial sequence
  synthetic peptide
WIPAPKPKNATVLIWIYGGGFQTGTS

SEQ ID NO: 11884 - protein, 26 aa, Artificial sequence
  synthetic peptide
IPAPKPKNATVLIWIYGGGFQTGTSS

SEQ ID NO: 11885 - protein, 26 aa, Artificial sequence
  synthetic peptide
PAPKPKNATVLIWIYGGGFQTGTSSL

SEQ ID NO: 11886 - protein, 26 aa, Artificial sequence
  synthetic peptide
APKPKNATVLIWIYGGGFQTGTSSLH

SEQ ID NO: 11887 - protein, 26 aa, Artificial sequence
  synthetic peptide
PKPKNATVLIWIYGGGFQTGTSSLHV

SEQ ID NO: 11888 - protein, 26 aa, Artificial sequence
  synthetic peptide
KPKNATVLIWIYGGGFQTGTSSLHVY

SEQ ID NO: 11889 - protein, 26 aa, Artificial sequence
  synthetic peptide
PKNATVLIWIYGGGFQTGTSSLHVYD

SEQ ID NO: 11890 - protein, 26 aa, Artificial sequence
  synthetic peptide
KNATVLIWIYGGGFQTGTSSLHVYDG

SEQ ID NO: 11891 - protein, 26 aa, Artificial sequence
  synthetic peptide
NATVLIWIYGGGFQTGTSSLHVYDGK

SEQ ID NO: 11892 - protein, 26 aa, Artificial sequence
  synthetic peptide
ATVLIWIYGGGFQTGTSSLHVYDGKF

SEQ ID NO: 11893 - protein, 26 aa, Artificial sequence
  synthetic peptide
TVLIWIYGGGFQTGTSSLHVYDGKFL

SEQ ID NO: 11894 - protein, 26 aa, Artificial sequence
  synthetic peptide
VLIWIYGGGFQTGTSSLHVYDGKFLA

SEQ ID NO: 11895 - protein, 26 aa, Artificial sequence
  synthetic peptide
LIWIYGGGFQTGTSSLHVYDGKFLAR

SEQ ID NO: 11896 - protein, 26 aa, Artificial sequence
  synthetic peptide
IWIYGGGFQTGTSSLHVYDGKFLARV

SEQ ID NO: 11897 - protein, 26 aa, Artificial sequence
  synthetic peptide
WIYGGGFQTGTSSLHVYDGKFLARVE

SEQ ID NO: 11898 - protein, 26 aa, Artificial sequence
  synthetic peptide
IYGGGFQTGTSSLHVYDGKFLARVER

SEQ ID NO: 11899 - protein, 26 aa, Artificial sequence
  synthetic peptide
YGGGFQTGTSSLHVYDGKFLARVERV

SEQ ID NO: 11900 - protein, 26 aa, Artificial sequence
  synthetic peptide
GGGFQTGTSSLHVYDGKFLARVERVI

SEQ ID NO: 11901 - protein, 26 aa, Artificial sequence
  synthetic peptide
GGFQTGTSSLHVYDGKFLARVERVIV

SEQ ID NO: 11902 - protein, 26 aa, Artificial sequence
  synthetic peptide
GFQTGTSSLHVYDGKFLARVERVIVV

SEQ ID NO: 11903 - protein, 26 aa, Artificial sequence
  synthetic peptide
FQTGTSSLHVYDGKFLARVERVIVVS

SEQ ID NO: 11904 - protein, 26 aa, Artificial sequence
  synthetic peptide
QTGTSSLHVYDGKFLARVERVIVVSM

SEQ ID NO: 11905 - protein, 26 aa, Artificial sequence
  synthetic peptide
TGTSSLHVYDGKFLARVERVIVVSMN

SEQ ID NO: 11906 - protein, 26 aa, Artificial sequence
  synthetic peptide
GTSSLHVYDGKFLARVERVIVVSMNY

SEQ ID NO: 11907 - protein, 26 aa, Artificial sequence
  synthetic peptide
TSSLHVYDGKFLARVERVIVVSMNYR

SEQ ID NO: 11908 - protein, 26 aa, Artificial sequence
  synthetic peptide
SSLHVYDGKFLARVERVIVVSMNYRV

SEQ ID NO: 11909 - protein, 26 aa, Artificial sequence
  synthetic peptide
SLHVYDGKFLARVERVIVVSMNYRVG

SEQ ID NO: 11910 - protein, 26 aa, Artificial sequence
  synthetic peptide
LHVYDGKFLARVERVIVVSMNYRVGA

SEQ ID NO: 11911 - protein, 26 aa, Artificial sequence
  synthetic peptide
HVYDGKFLARVERVIVVSMNYRVGAL

SEQ ID NO: 11912 - protein, 26 aa, Artificial sequence
  synthetic peptide
VYDGKFLARVERVIVVSMNYRVGALG

SEQ ID NO: 11913 - protein, 26 aa, Artificial sequence
  synthetic peptide
YDGKFLARVERVIVVSMNYRVGALGF

SEQ ID NO: 11914 - protein, 26 aa, Artificial sequence
  synthetic peptide
DGKFLARVERVIVVSMNYRVGALGFL

SEQ ID NO: 11915 - protein, 26 aa, Artificial sequence
  synthetic peptide
GKFLARVERVIVVSMNYRVGALGFLA

SEQ ID NO: 11916 - protein, 26 aa, Artificial sequence
  synthetic peptide
KFLARVERVIVVSMNYRVGALGFLAL

SEQ ID NO: 11917 - protein, 26 aa, Artificial sequence
  synthetic peptide
FLARVERVIVVSMNYRVGALGFLALP

SEQ ID NO: 11918 - protein, 26 aa, Artificial sequence
  synthetic peptide
LARVERVIVVSMNYRVGALGFLALPG

SEQ ID NO: 11919 - protein, 26 aa, Artificial sequence
  synthetic peptide
ARVERVIVVSMNYRVGALGFLALPGN

SEQ ID NO: 11920 - protein, 26 aa, Artificial sequence
  synthetic peptide
RVERVIVVSMNYRVGALGFLALPGNP

SEQ ID NO: 11921 - protein, 26 aa, Artificial sequence
  synthetic peptide
VERVIVVSMNYRVGALGFLALPGNPE

SEQ ID NO: 11922 - protein, 26 aa, Artificial sequence
  synthetic peptide
ERVIVVSMNYRVGALGFLALPGNPEA

SEQ ID NO: 11923 - protein, 26 aa, Artificial sequence
  synthetic peptide
RVIVVSMNYRVGALGFLALPGNPEAP

SEQ ID NO: 11924 - protein, 26 aa, Artificial sequence
  synthetic peptide
VIVVSMNYRVGALGFLALPGNPEAPG

SEQ ID NO: 11925 - protein, 26 aa, Artificial sequence
  synthetic peptide
IVVSMNYRVGALGFLALPGNPEAPGN

SEQ ID NO: 11926 - protein, 26 aa, Artificial sequence
  synthetic peptide
VVSMNYRVGALGFLALPGNPEAPGNM

SEQ ID NO: 11927 - protein, 26 aa, Artificial sequence
  synthetic peptide
VSMNYRVGALGFLALPGNPEAPGNMG

SEQ ID NO: 11928 - protein, 26 aa, Artificial sequence
  synthetic peptide
SMNYRVGALGFLALPGNPEAPGNMGL

SEQ ID NO: 11929 - protein, 26 aa, Artificial sequence
  synthetic peptide
MNYRVGALGFLALPGNPEAPGNMGLF

SEQ ID NO: 11930 - protein, 26 aa, Artificial sequence
  synthetic peptide
NYRVGALGFLALPGNPEAPGNMGLFD

SEQ ID NO: 11931 - protein, 26 aa, Artificial sequence
  synthetic peptide
YRVGALGFLALPGNPEAPGNMGLFDQ

SEQ ID NO: 11932 - protein, 26 aa, Artificial sequence
  synthetic peptide
RVGALGFLALPGNPEAPGNMGLFDQQ

SEQ ID NO: 11933 - protein, 26 aa, Artificial sequence
  synthetic peptide
VGALGFLALPGNPEAPGNMGLFDQQL

SEQ ID NO: 11934 - protein, 26 aa, Artificial sequence
  synthetic peptide
GALGFLALPGNPEAPGNMGLFDQQLA

SEQ ID NO: 11935 - protein, 26 aa, Artificial sequence
  synthetic peptide
ALGFLALPGNPEAPGNMGLFDQQLAL

SEQ ID NO: 11936 - protein, 26 aa, Artificial sequence
  synthetic peptide
LGFLALPGNPEAPGNMGLFDQQLALQ

SEQ ID NO: 11937 - protein, 26 aa, Artificial sequence
  synthetic peptide
GFLALPGNPEAPGNMGLFDQQLALQW

SEQ ID NO: 11938 - protein, 26 aa, Artificial sequence
  synthetic peptide
FLALPGNPEAPGNMGLFDQQLALQWV

SEQ ID NO: 11939 - protein, 26 aa, Artificial sequence
  synthetic peptide
LALPGNPEAPGNMGLFDQQLALQWVQ

SEQ ID NO: 11940 - protein, 26 aa, Artificial sequence
  synthetic peptide
ALPGNPEAPGNMGLFDQQLALQWVQK

SEQ ID NO: 11941 - protein, 26 aa, Artificial sequence
  synthetic peptide
LPGNPEAPGNMGLFDQQLALQWVQKN

SEQ ID NO: 11942 - protein, 26 aa, Artificial sequence
  synthetic peptide
PGNPEAPGNMGLFDQQLALQWVQKNI

SEQ ID NO: 11943 - protein, 26 aa, Artificial sequence
  synthetic peptide
GNPEAPGNMGLFDQQLALQWVQKNIA

SEQ ID NO: 11944 - protein, 26 aa, Artificial sequence
  synthetic peptide
NPEAPGNMGLFDQQLALQWVQKNIAA

SEQ ID NO: 11945 - protein, 26 aa, Artificial sequence
  synthetic peptide
PEAPGNMGLFDQQLALQWVQKNIAAF

SEQ ID NO: 11946 - protein, 26 aa, Artificial sequence
  synthetic peptide
EAPGNMGLFDQQLALQWVQKNIAAFG

SEQ ID NO: 11947 - protein, 26 aa, Artificial sequence
  synthetic peptide
APGNMGLFDQQLALQWVQKNIAAFGG

SEQ ID NO: 11948 - protein, 26 aa, Artificial sequence
  synthetic peptide
PGNMGLFDQQLALQWVQKNIAAFGGN

SEQ ID NO: 11949 - protein, 26 aa, Artificial sequence
  synthetic peptide
GNMGLFDQQLALQWVQKNIAAFGGNP

SEQ ID NO: 11950 - protein, 26 aa, Artificial sequence
  synthetic peptide
NMGLFDQQLALQWVQKNIAAFGGNPK

SEQ ID NO: 11951 - protein, 26 aa, Artificial sequence
  synthetic peptide
MGLFDQQLALQWVQKNIAAFGGNPKS

SEQ ID NO: 11952 - protein, 26 aa, Artificial sequence
  synthetic peptide
GLFDQQLALQWVQKNIAAFGGNPKSV

SEQ ID NO: 11953 - protein, 26 aa, Artificial sequence
  synthetic peptide
LFDQQLALQWVQKNIAAFGGNPKSVT

SEQ ID NO: 11954 - protein, 26 aa, Artificial sequence
  synthetic peptide
FDQQLALQWVQKNIAAFGGNPKSVTL

SEQ ID NO: 11955 - protein, 26 aa, Artificial sequence
  synthetic peptide
DQQLALQWVQKNIAAFGGNPKSVTLF

SEQ ID NO: 11956 - protein, 26 aa, Artificial sequence
  synthetic peptide
QQLALQWVQKNIAAFGGNPKSVTLFG

SEQ ID NO: 11957 - protein, 26 aa, Artificial sequence
  synthetic peptide
QLALQWVQKNIAAFGGNPKSVTLFGE

SEQ ID NO: 11958 - protein, 26 aa, Artificial sequence
  synthetic peptide
LALQWVQKNIAAFGGNPKSVTLFGES

SEQ ID NO: 11959 - protein, 26 aa, Artificial sequence
  synthetic peptide
ALQWVQKNIAAFGGNPKSVTLFGESA

SEQ ID NO: 11960 - protein, 26 aa, Artificial sequence
  synthetic peptide
LQWVQKNIAAFGGNPKSVTLFGESAG

SEQ ID NO: 11961 - protein, 26 aa, Artificial sequence
  synthetic peptide
QWVQKNIAAFGGNPKSVTLFGESAGA

SEQ ID NO: 11962 - protein, 26 aa, Artificial sequence
  synthetic peptide
WVQKNIAAFGGNPKSVTLFGESAGAA

SEQ ID NO: 11963 - protein, 26 aa, Artificial sequence
  synthetic peptide
VQKNIAAFGGNPKSVTLFGESAGAAS

SEQ ID NO: 11964 - protein, 26 aa, Artificial sequence
  synthetic peptide
QKNIAAFGGNPKSVTLFGESAGAASV

SEQ ID NO: 11965 - protein, 26 aa, Artificial sequence
  synthetic peptide
KNIAAFGGNPKSVTLFGESAGAASVS

SEQ ID NO: 11966 - protein, 26 aa, Artificial sequence
  synthetic peptide
NIAAFGGNPKSVTLFGESAGAASVSL

SEQ ID NO: 11967 - protein, 26 aa, Artificial sequence
  synthetic peptide
IAAFGGNPKSVTLFGESAGAASVSLH

SEQ ID NO: 11968 - protein, 26 aa, Artificial sequence
  synthetic peptide
AAFGGNPKSVTLFGESAGAASVSLHL

SEQ ID NO: 11969 - protein, 26 aa, Artificial sequence
  synthetic peptide
AFGGNPKSVTLFGESAGAASVSLHLL

SEQ ID NO: 11970 - protein, 26 aa, Artificial sequence
  synthetic peptide
FGGNPKSVTLFGESAGAASVSLHLLS

SEQ ID NO: 11971 - protein, 26 aa, Artificial sequence
  synthetic peptide
GGNPKSVTLFGESAGAASVSLHLLSP

SEQ ID NO: 11972 - protein, 26 aa, Artificial sequence
  synthetic peptide
GNPKSVTLFGESAGAASVSLHLLSPG

SEQ ID NO: 11973 - protein, 26 aa, Artificial sequence
  synthetic peptide
NPKSVTLFGESAGAASVSLHLLSPGS

SEQ ID NO: 11974 - protein, 26 aa, Artificial sequence
  synthetic peptide
PKSVTLFGESAGAASVSLHLLSPGSH

SEQ ID NO: 11975 - protein, 26 aa, Artificial sequence
  synthetic peptide
KSVTLFGESAGAASVSLHLLSPGSHS

SEQ ID NO: 11976 - protein, 26 aa, Artificial sequence
  synthetic peptide
SVTLFGESAGAASVSLHLLSPGSHSL

SEQ ID NO: 11977 - protein, 26 aa, Artificial sequence
  synthetic peptide
VTLFGESAGAASVSLHLLSPGSHSLF

SEQ ID NO: 11978 - protein, 26 aa, Artificial sequence
  synthetic peptide
TLFGESAGAASVSLHLLSPGSHSLFT

SEQ ID NO: 11979 - protein, 26 aa, Artificial sequence
  synthetic peptide
LFGESAGAASVSLHLLSPGSHSLFTR

SEQ ID NO: 11980 - protein, 26 aa, Artificial sequence
  synthetic peptide
FGESAGAASVSLHLLSPGSHSLFTRA

SEQ ID NO: 11981 - protein, 26 aa, Artificial sequence
  synthetic peptide
GESAGAASVSLHLLSPGSHSLFTRAI

SEQ ID NO: 11982 - protein, 26 aa, Artificial sequence
  synthetic peptide
ESAGAASVSLHLLSPGSHSLFTRAIL

SEQ ID NO: 11983 - protein, 26 aa, Artificial sequence
  synthetic peptide
SAGAASVSLHLLSPGSHSLFTRAILQ

SEQ ID NO: 11984 - protein, 26 aa, Artificial sequence
  synthetic peptide
AGAASVSLHLLSPGSHSLFTRAILQS

SEQ ID NO: 11985 - protein, 26 aa, Artificial sequence
  synthetic peptide
GAASVSLHLLSPGSHSLFTRAILQSG

SEQ ID NO: 11986 - protein, 26 aa, Artificial sequence
  synthetic peptide
AASVSLHLLSPGSHSLFTRAILQSGS

SEQ ID NO: 11987 - protein, 26 aa, Artificial sequence
  synthetic peptide
ASVSLHLLSPGSHSLFTRAILQSGSF

SEQ ID NO: 11988 - protein, 26 aa, Artificial sequence
  synthetic peptide
SVSLHLLSPGSHSLFTRAILQSGSFN

SEQ ID NO: 11989 - protein, 26 aa, Artificial sequence
  synthetic peptide
VSLHLLSPGSHSLFTRAILQSGSFNA

SEQ ID NO: 11990 - protein, 26 aa, Artificial sequence
  synthetic peptide
SLHLLSPGSHSLFTRAILQSGSFNAP

SEQ ID NO: 11991 - protein, 26 aa, Artificial sequence
  synthetic peptide
LHLLSPGSHSLFTRAILQSGSFNAPW

SEQ ID NO: 11992 - protein, 26 aa, Artificial sequence
  synthetic peptide
HLLSPGSHSLFTRAILQSGSFNAPWA

SEQ ID NO: 11993 - protein, 26 aa, Artificial sequence
  synthetic peptide
LLSPGSHSLFTRAILQSGSFNAPWAV

SEQ ID NO: 11994 - protein, 26 aa, Artificial sequence
  synthetic peptide
LSPGSHSLFTRAILQSGSFNAPWAVT

SEQ ID NO: 11995 - protein, 26 aa, Artificial sequence
  synthetic peptide
SPGSHSLFTRAILQSGSFNAPWAVTS

SEQ ID NO: 11996 - protein, 26 aa, Artificial sequence
  synthetic peptide
PGSHSLFTRAILQSGSFNAPWAVTSL

SEQ ID NO: 11997 - protein, 26 aa, Artificial sequence
  synthetic peptide
GSHSLFTRAILQSGSFNAPWAVTSLY

SEQ ID NO: 11998 - protein, 26 aa, Artificial sequence
  synthetic peptide
SHSLFTRAILQSGSFNAPWAVTSLYE

SEQ ID NO: 11999 - protein, 26 aa, Artificial sequence
  synthetic peptide
HSLFTRAILQSGSFNAPWAVTSLYEA

SEQ ID NO: 12000 - protein, 26 aa, Artificial sequence
  synthetic peptide
SLFTRAILQSGSFNAPWAVTSLYEAR

SEQ ID NO: 12001 - protein, 26 aa, Artificial sequence
  synthetic peptide
LFTRAILQSGSFNAPWAVTSLYEARN

SEQ ID NO: 12002 - protein, 26 aa, Artificial sequence
  synthetic peptide
FTRAILQSGSFNAPWAVTSLYEARNR

SEQ ID NO: 12003 - protein, 26 aa, Artificial sequence
  synthetic peptide
TRAILQSGSFNAPWAVTSLYEARNRT

SEQ ID NO: 12004 - protein, 26 aa, Artificial sequence
  synthetic peptide
RAILQSGSFNAPWAVTSLYEARNRTL

SEQ ID NO: 12005 - protein, 26 aa, Artificial sequence
  synthetic peptide
AILQSGSFNAPWAVTSLYEARNRTLN

SEQ ID NO: 12006 - protein, 26 aa, Artificial sequence
  synthetic peptide
ILQSGSFNAPWAVTSLYEARNRTLNL

SEQ ID NO: 12007 - protein, 26 aa, Artificial sequence
  synthetic peptide
LQSGSFNAPWAVTSLYEARNRTLNLA

SEQ ID NO: 12008 - protein, 26 aa, Artificial sequence
  synthetic peptide
QSGSFNAPWAVTSLYEARNRTLNLAK

SEQ ID NO: 12009 - protein, 26 aa, Artificial sequence
  synthetic peptide
SGSFNAPWAVTSLYEARNRTLNLAKL

SEQ ID NO: 12010 - protein, 26 aa, Artificial sequence
  synthetic peptide
GSFNAPWAVTSLYEARNRTLNLAKLT

SEQ ID NO: 12011 - protein, 26 aa, Artificial sequence
  synthetic peptide
SFNAPWAVTSLYEARNRTLNLAKLTG

SEQ ID NO: 12012 - protein, 26 aa, Artificial sequence
  synthetic peptide
FNAPWAVTSLYEARNRTLNLAKLTGC

SEQ ID NO: 12013 - protein, 26 aa, Artificial sequence
  synthetic peptide
NAPWAVTSLYEARNRTLNLAKLTGCS

SEQ ID NO: 12014 - protein, 26 aa, Artificial sequence
  synthetic peptide
APWAVTSLYEARNRTLNLAKLTGCSR

SEQ ID NO: 12015 - protein, 26 aa, Artificial sequence
  synthetic peptide
PWAVTSLYEARNRTLNLAKLTGCSRE

SEQ ID NO: 12016 - protein, 26 aa, Artificial sequence
  synthetic peptide
WAVTSLYEARNRTLNLAKLTGCSREN

SEQ ID NO: 12017 - protein, 26 aa, Artificial sequence
  synthetic peptide
AVTSLYEARNRTLNLAKLTGCSRENE

SEQ ID NO: 12018 - protein, 26 aa, Artificial sequence
  synthetic peptide
VTSLYEARNRTLNLAKLTGCSRENET

SEQ ID NO: 12019 - protein, 26 aa, Artificial sequence
  synthetic peptide
TSLYEARNRTLNLAKLTGCSRENETE

SEQ ID NO: 12020 - protein, 26 aa, Artificial sequence
  synthetic peptide
SLYEARNRTLNLAKLTGCSRENETEI

SEQ ID NO: 12021 - protein, 26 aa, Artificial sequence
  synthetic peptide
LYEARNRTLNLAKLTGCSRENETEII

SEQ ID NO: 12022 - protein, 26 aa, Artificial sequence
  synthetic peptide
YEARNRTLNLAKLTGCSRENETEIIK

SEQ ID NO: 12023 - protein, 26 aa, Artificial sequence
  synthetic peptide
EARNRTLNLAKLTGCSRENETEIIKC

SEQ ID NO: 12024 - protein, 26 aa, Artificial sequence
  synthetic peptide
ARNRTLNLAKLTGCSRENETEIIKCL

SEQ ID NO: 12025 - protein, 26 aa, Artificial sequence
  synthetic peptide
RNRTLNLAKLTGCSRENETEIIKCLR

SEQ ID NO: 12026 - protein, 26 aa, Artificial sequence
  synthetic peptide
NRTLNLAKLTGCSRENETEIIKCLRN

SEQ ID NO: 12027 - protein, 26 aa, Artificial sequence
  synthetic peptide
RTLNLAKLTGCSRENETEIIKCLRNK

SEQ ID NO: 12028 - protein, 26 aa, Artificial sequence
  synthetic peptide
TLNLAKLTGCSRENETEIIKCLRNKD

SEQ ID NO: 12029 - protein, 26 aa, Artificial sequence
  synthetic peptide
LNLAKLTGCSRENETEIIKCLRNKDP

SEQ ID NO: 12030 - protein, 26 aa, Artificial sequence
  synthetic peptide
NLAKLTGCSRENETEIIKCLRNKDPQ

SEQ ID NO: 12031 - protein, 26 aa, Artificial sequence
  synthetic peptide
LAKLTGCSRENETEIIKCLRNKDPQE

SEQ ID NO: 12032 - protein, 26 aa, Artificial sequence
  synthetic peptide
AKLTGCSRENETEIIKCLRNKDPQEI

SEQ ID NO: 12033 - protein, 26 aa, Artificial sequence
  synthetic peptide
KLTGCSRENETEIIKCLRNKDPQEIL

SEQ ID NO: 12034 - protein, 26 aa, Artificial sequence
  synthetic peptide
LTGCSRENETEIIKCLRNKDPQEILL

SEQ ID NO: 12035 - protein, 26 aa, Artificial sequence
  synthetic peptide
TGCSRENETEIIKCLRNKDPQEILLN

SEQ ID NO: 12036 - protein, 26 aa, Artificial sequence
  synthetic peptide
GCSRENETEIIKCLRNKDPQEILLNE

SEQ ID NO: 12037 - protein, 26 aa, Artificial sequence
  synthetic peptide
CSRENETEIIKCLRNKDPQEILLNEA

SEQ ID NO: 12038 - protein, 26 aa, Artificial sequence
  synthetic peptide
SRENETEIIKCLRNKDPQEILLNEAF

SEQ ID NO: 12039 - protein, 26 aa, Artificial sequence
  synthetic peptide
RENETEIIKCLRNKDPQEILLNEAFV

SEQ ID NO: 12040 - protein, 26 aa, Artificial sequence
  synthetic peptide
ENETEIIKCLRNKDPQEILLNEAFVV

SEQ ID NO: 12041 - protein, 26 aa, Artificial sequence
  synthetic peptide
NETEIIKCLRNKDPQEILLNEAFVVP

SEQ ID NO: 12042 - protein, 26 aa, Artificial sequence
  synthetic peptide
ETEIIKCLRNKDPQEILLNEAFVVPY

SEQ ID NO: 12043 - protein, 26 aa, Artificial sequence
  synthetic peptide
TEIIKCLRNKDPQEILLNEAFVVPYG

SEQ ID NO: 12044 - protein, 26 aa, Artificial sequence
  synthetic peptide
EIIKCLRNKDPQEILLNEAFVVPYGT

SEQ ID NO: 12045 - protein, 26 aa, Artificial sequence
  synthetic peptide
IIKCLRNKDPQEILLNEAFVVPYGTP

SEQ ID NO: 12046 - protein, 26 aa, Artificial sequence
  synthetic peptide
IKCLRNKDPQEILLNEAFVVPYGTPL

SEQ ID NO: 12047 - protein, 26 aa, Artificial sequence
  synthetic peptide
KCLRNKDPQEILLNEAFVVPYGTPLS

SEQ ID NO: 12048 - protein, 26 aa, Artificial sequence
  synthetic peptide
CLRNKDPQEILLNEAFVVPYGTPLSV

SEQ ID NO: 12049 - protein, 26 aa, Artificial sequence
  synthetic peptide
LRNKDPQEILLNEAFVVPYGTPLSVN

SEQ ID NO: 12050 - protein, 26 aa, Artificial sequence
  synthetic peptide
RNKDPQEILLNEAFVVPYGTPLSVNF

SEQ ID NO: 12051 - protein, 26 aa, Artificial sequence
  synthetic peptide
NKDPQEILLNEAFVVPYGTPLSVNFG

SEQ ID NO: 12052 - protein, 26 aa, Artificial sequence
  synthetic peptide
KDPQEILLNEAFVVPYGTPLSVNFGP

SEQ ID NO: 12053 - protein, 26 aa, Artificial sequence
  synthetic peptide
DPQEILLNEAFVVPYGTPLSVNFGPT

SEQ ID NO: 12054 - protein, 26 aa, Artificial sequence
  synthetic peptide
PQEILLNEAFVVPYGTPLSVNFGPTV

SEQ ID NO: 12055 - protein, 26 aa, Artificial sequence
  synthetic peptide
QEILLNEAFVVPYGTPLSVNFGPTVD

SEQ ID NO: 12056 - protein, 26 aa, Artificial sequence
  synthetic peptide
EILLNEAFVVPYGTPLSVNFGPTVDG

SEQ ID NO: 12057 - protein, 26 aa, Artificial sequence
  synthetic peptide
ILLNEAFVVPYGTPLSVNFGPTVDGD

SEQ ID NO: 12058 - protein, 26 aa, Artificial sequence
  synthetic peptide
LLNEAFVVPYGTPLSVNFGPTVDGDF

SEQ ID NO: 12059 - protein, 26 aa, Artificial sequence
  synthetic peptide
LNEAFVVPYGTPLSVNFGPTVDGDFL

SEQ ID NO: 12060 - protein, 26 aa, Artificial sequence
  synthetic peptide
NEAFVVPYGTPLSVNFGPTVDGDFLT

SEQ ID NO: 12061 - protein, 26 aa, Artificial sequence
  synthetic peptide
EAFVVPYGTPLSVNFGPTVDGDFLTD

SEQ ID NO: 12062 - protein, 26 aa, Artificial sequence
  synthetic peptide
AFVVPYGTPLSVNFGPTVDGDFLTDM

SEQ ID NO: 12063 - protein, 26 aa, Artificial sequence
  synthetic peptide
FVVPYGTPLSVNFGPTVDGDFLTDMP

SEQ ID NO: 12064 - protein, 26 aa, Artificial sequence
  synthetic peptide
VVPYGTPLSVNFGPTVDGDFLTDMPD

SEQ ID NO: 12065 - protein, 26 aa, Artificial sequence
  synthetic peptide
VPYGTPLSVNFGPTVDGDFLTDMPDI

SEQ ID NO: 12066 - protein, 26 aa, Artificial sequence
  synthetic peptide
PYGTPLSVNFGPTVDGDFLTDMPDIL

SEQ ID NO: 12067 - protein, 26 aa, Artificial sequence
  synthetic peptide
YGTPLSVNFGPTVDGDFLTDMPDILL

SEQ ID NO: 12068 - protein, 26 aa, Artificial sequence
  synthetic peptide
GTPLSVNFGPTVDGDFLTDMPDILLE

SEQ ID NO: 12069 - protein, 26 aa, Artificial sequence
  synthetic peptide
TPLSVNFGPTVDGDFLTDMPDILLEL

SEQ ID NO: 12070 - protein, 26 aa, Artificial sequence
  synthetic peptide
PLSVNFGPTVDGDFLTDMPDILLELG

SEQ ID NO: 12071 - protein, 26 aa, Artificial sequence
  synthetic peptide
LSVNFGPTVDGDFLTDMPDILLELGQ

SEQ ID NO: 12072 - protein, 26 aa, Artificial sequence
  synthetic peptide
SVNFGPTVDGDFLTDMPDILLELGQF

SEQ ID NO: 12073 - protein, 26 aa, Artificial sequence
  synthetic peptide
VNFGPTVDGDFLTDMPDILLELGQFK

SEQ ID NO: 12074 - protein, 26 aa, Artificial sequence
  synthetic peptide
NFGPTVDGDFLTDMPDILLELGQFKK

SEQ ID NO: 12075 - protein, 26 aa, Artificial sequence
  synthetic peptide
FGPTVDGDFLTDMPDILLELGQFKKT

SEQ ID NO: 12076 - protein, 26 aa, Artificial sequence
  synthetic peptide
GPTVDGDFLTDMPDILLELGQFKKTQ

SEQ ID NO: 12077 - protein, 26 aa, Artificial sequence
  synthetic peptide
PTVDGDFLTDMPDILLELGQFKKTQI

SEQ ID NO: 12078 - protein, 26 aa, Artificial sequence
  synthetic peptide
TVDGDFLTDMPDILLELGQFKKTQIL

SEQ ID NO: 12079 - protein, 26 aa, Artificial sequence
  synthetic peptide
VDGDFLTDMPDILLELGQFKKTQILV

SEQ ID NO: 12080 - protein, 26 aa, Artificial sequence
  synthetic peptide
DGDFLTDMPDILLELGQFKKTQILVG

SEQ ID NO: 12081 - protein, 26 aa, Artificial sequence
  synthetic peptide
GDFLTDMPDILLELGQFKKTQILVGV

SEQ ID NO: 12082 - protein, 26 aa, Artificial sequence
  synthetic peptide
DFLTDMPDILLELGQFKKTQILVGVN

SEQ ID NO: 12083 - protein, 26 aa, Artificial sequence
  synthetic peptide
FLTDMPDILLELGQFKKTQILVGVNK

SEQ ID NO: 12084 - protein, 26 aa, Artificial sequence
  synthetic peptide
LTDMPDILLELGQFKKTQILVGVNKD

SEQ ID NO: 12085 - protein, 26 aa, Artificial sequence
  synthetic peptide
TDMPDILLELGQFKKTQILVGVNKDE

SEQ ID NO: 12086 - protein, 26 aa, Artificial sequence
  synthetic peptide
DMPDILLELGQFKKTQILVGVNKDEG

SEQ ID NO: 12087 - protein, 26 aa, Artificial sequence
  synthetic peptide
MPDILLELGQFKKTQILVGVNKDEGT

SEQ ID NO: 12088 - protein, 26 aa, Artificial sequence
  synthetic peptide
PDILLELGQFKKTQILVGVNKDEGTA

SEQ ID NO: 12089 - protein, 26 aa, Artificial sequence
  synthetic peptide
DILLELGQFKKTQILVGVNKDEGTAF

SEQ ID NO: 12090 - protein, 26 aa, Artificial sequence
  synthetic peptide
ILLELGQFKKTQILVGVNKDEGTAFL

SEQ ID NO: 12091 - protein, 26 aa, Artificial sequence
  synthetic peptide
LLELGQFKKTQILVGVNKDEGTAFLV

SEQ ID NO: 12092 - protein, 26 aa, Artificial sequence
  synthetic peptide
LELGQFKKTQILVGVNKDEGTAFLVY

SEQ ID NO: 12093 - protein, 26 aa, Artificial sequence
  synthetic peptide
ELGQFKKTQILVGVNKDEGTAFLVYG

SEQ ID NO: 12094 - protein, 26 aa, Artificial sequence
  synthetic peptide
LGQFKKTQILVGVNKDEGTAFLVYGA

SEQ ID NO: 12095 - protein, 26 aa, Artificial sequence
  synthetic peptide
GQFKKTQILVGVNKDEGTAFLVYGAP

SEQ ID NO: 12096 - protein, 26 aa, Artificial sequence
  synthetic peptide
QFKKTQILVGVNKDEGTAFLVYGAPG

SEQ ID NO: 12097 - protein, 26 aa, Artificial sequence
  synthetic peptide
FKKTQILVGVNKDEGTAFLVYGAPGF

SEQ ID NO: 12098 - protein, 26 aa, Artificial sequence
  synthetic peptide
KKTQILVGVNKDEGTAFLVYGAPGFS

SEQ ID NO: 12099 - protein, 26 aa, Artificial sequence
  synthetic peptide
KTQILVGVNKDEGTAFLVYGAPGFSK

SEQ ID NO: 12100 - protein, 26 aa, Artificial sequence
  synthetic peptide
TQILVGVNKDEGTAFLVYGAPGFSKD

SEQ ID NO: 12101 - protein, 26 aa, Artificial sequence
  synthetic peptide
QILVGVNKDEGTAFLVYGAPGFSKDN

SEQ ID NO: 12102 - protein, 26 aa, Artificial sequence
  synthetic peptide
ILVGVNKDEGTAFLVYGAPGFSKDNN

SEQ ID NO: 12103 - protein, 26 aa, Artificial sequence
  synthetic peptide
LVGVNKDEGTAFLVYGAPGFSKDNNS

SEQ ID NO: 12104 - protein, 26 aa, Artificial sequence
  synthetic peptide
VGVNKDEGTAFLVYGAPGFSKDNNSI

SEQ ID NO: 12105 - protein, 26 aa, Artificial sequence
  synthetic peptide
GVNKDEGTAFLVYGAPGFSKDNNSII

SEQ ID NO: 12106 - protein, 26 aa, Artificial sequence
  synthetic peptide
VNKDEGTAFLVYGAPGFSKDNNSIIT

SEQ ID NO: 12107 - protein, 26 aa, Artificial sequence
  synthetic peptide
NKDEGTAFLVYGAPGFSKDNNSIITR

SEQ ID NO: 12108 - protein, 26 aa, Artificial sequence
  synthetic peptide
KDEGTAFLVYGAPGFSKDNNSIITRK

SEQ ID NO: 12109 - protein, 26 aa, Artificial sequence
  synthetic peptide
DEGTAFLVYGAPGFSKDNNSIITRKE

SEQ ID NO: 12110 - protein, 26 aa, Artificial sequence
  synthetic peptide
EGTAFLVYGAPGFSKDNNSIITRKEF

SEQ ID NO: 12111 - protein, 26 aa, Artificial sequence
  synthetic peptide
GTAFLVYGAPGFSKDNNSIITRKEFQ

SEQ ID NO: 12112 - protein, 26 aa, Artificial sequence
  synthetic peptide
TAFLVYGAPGFSKDNNSIITRKEFQE

SEQ ID NO: 12113 - protein, 26 aa, Artificial sequence
  synthetic peptide
AFLVYGAPGFSKDNNSIITRKEFQEG

SEQ ID NO: 12114 - protein, 26 aa, Artificial sequence
  synthetic peptide
FLVYGAPGFSKDNNSIITRKEFQEGL

SEQ ID NO: 12115 - protein, 26 aa, Artificial sequence
  synthetic peptide
LVYGAPGFSKDNNSIITRKEFQEGLK

SEQ ID NO: 12116 - protein, 26 aa, Artificial sequence
  synthetic peptide
VYGAPGFSKDNNSIITRKEFQEGLKI

SEQ ID NO: 12117 - protein, 26 aa, Artificial sequence
  synthetic peptide
YGAPGFSKDNNSIITRKEFQEGLKIF

SEQ ID NO: 12118 - protein, 26 aa, Artificial sequence
  synthetic peptide
GAPGFSKDNNSIITRKEFQEGLKIFF

SEQ ID NO: 12119 - protein, 26 aa, Artificial sequence
  synthetic peptide
APGFSKDNNSIITRKEFQEGLKIFFP

SEQ ID NO: 12120 - protein, 26 aa, Artificial sequence
  synthetic peptide
PGFSKDNNSIITRKEFQEGLKIFFPG

SEQ ID NO: 12121 - protein, 26 aa, Artificial sequence
  synthetic peptide
GFSKDNNSIITRKEFQEGLKIFFPGV

SEQ ID NO: 12122 - protein, 26 aa, Artificial sequence
  synthetic peptide
FSKDNNSIITRKEFQEGLKIFFPGVS

SEQ ID NO: 12123 - protein, 26 aa, Artificial sequence
  synthetic peptide
SKDNNSIITRKEFQEGLKIFFPGVSE

SEQ ID NO: 12124 - protein, 26 aa, Artificial sequence
  synthetic peptide
KDNNSIITRKEFQEGLKIFFPGVSEF

SEQ ID NO: 12125 - protein, 26 aa, Artificial sequence
  synthetic peptide
DNNSIITRKEFQEGLKIFFPGVSEFG

SEQ ID NO: 12126 - protein, 26 aa, Artificial sequence
  synthetic peptide
NNSIITRKEFQEGLKIFFPGVSEFGK

SEQ ID NO: 12127 - protein, 26 aa, Artificial sequence
  synthetic peptide
NSIITRKEFQEGLKIFFPGVSEFGKE

SEQ ID NO: 12128 - protein, 26 aa, Artificial sequence
  synthetic peptide
SIITRKEFQEGLKIFFPGVSEFGKES

SEQ ID NO: 12129 - protein, 26 aa, Artificial sequence
  synthetic peptide
IITRKEFQEGLKIFFPGVSEFGKESI

SEQ ID NO: 12130 - protein, 26 aa, Artificial sequence
  synthetic peptide
ITRKEFQEGLKIFFPGVSEFGKESIL

SEQ ID NO: 12131 - protein, 26 aa, Artificial sequence
  synthetic peptide
TRKEFQEGLKIFFPGVSEFGKESILF

SEQ ID NO: 12132 - protein, 26 aa, Artificial sequence
  synthetic peptide
RKEFQEGLKIFFPGVSEFGKESILFH

SEQ ID NO: 12133 - protein, 26 aa, Artificial sequence
  synthetic peptide
KEFQEGLKIFFPGVSEFGKESILFHY

SEQ ID NO: 12134 - protein, 26 aa, Artificial sequence
  synthetic peptide
EFQEGLKIFFPGVSEFGKESILFHYT

SEQ ID NO: 12135 - protein, 26 aa, Artificial sequence
  synthetic peptide
FQEGLKIFFPGVSEFGKESILFHYTD

SEQ ID NO: 12136 - protein, 26 aa, Artificial sequence
  synthetic peptide
QEGLKIFFPGVSEFGKESILFHYTDW

SEQ ID NO: 12137 - protein, 26 aa, Artificial sequence
  synthetic peptide
EGLKIFFPGVSEFGKESILFHYTDWV

SEQ ID NO: 12138 - protein, 26 aa, Artificial sequence
  synthetic peptide
GLKIFFPGVSEFGKESILFHYTDWVD

SEQ ID NO: 12139 - protein, 26 aa, Artificial sequence
  synthetic peptide
LKIFFPGVSEFGKESILFHYTDWVDD

SEQ ID NO: 12140 - protein, 26 aa, Artificial sequence
  synthetic peptide
KIFFPGVSEFGKESILFHYTDWVDDQ

SEQ ID NO: 12141 - protein, 26 aa, Artificial sequence
  synthetic peptide
IFFPGVSEFGKESILFHYTDWVDDQR

SEQ ID NO: 12142 - protein, 26 aa, Artificial sequence
  synthetic peptide
FFPGVSEFGKESILFHYTDWVDDQRP

SEQ ID NO: 12143 - protein, 26 aa, Artificial sequence
  synthetic peptide
FPGVSEFGKESILFHYTDWVDDQRPE

SEQ ID NO: 12144 - protein, 26 aa, Artificial sequence
  synthetic peptide
PGVSEFGKESILFHYTDWVDDQRPEN

SEQ ID NO: 12145 - protein, 26 aa, Artificial sequence
  synthetic peptide
GVSEFGKESILFHYTDWVDDQRPENY

SEQ ID NO: 12146 - protein, 26 aa, Artificial sequence
  synthetic peptide
VSEFGKESILFHYTDWVDDQRPENYR

SEQ ID NO: 12147 - protein, 26 aa, Artificial sequence
  synthetic peptide
SEFGKESILFHYTDWVDDQRPENYRE

SEQ ID NO: 12148 - protein, 26 aa, Artificial sequence
  synthetic peptide
EFGKESILFHYTDWVDDQRPENYREA

SEQ ID NO: 12149 - protein, 26 aa, Artificial sequence
  synthetic peptide
FGKESILFHYTDWVDDQRPENYREAL

SEQ ID NO: 12150 - protein, 26 aa, Artificial sequence
  synthetic peptide
GKESILFHYTDWVDDQRPENYREALG

SEQ ID NO: 12151 - protein, 26 aa, Artificial sequence
  synthetic peptide
KESILFHYTDWVDDQRPENYREALGD

SEQ ID NO: 12152 - protein, 26 aa, Artificial sequence
  synthetic peptide
ESILFHYTDWVDDQRPENYREALGDV

SEQ ID NO: 12153 - protein, 26 aa, Artificial sequence
  synthetic peptide
SILFHYTDWVDDQRPENYREALGDVV

SEQ ID NO: 12154 - protein, 26 aa, Artificial sequence
  synthetic peptide
ILFHYTDWVDDQRPENYREALGDVVG

SEQ ID NO: 12155 - protein, 26 aa, Artificial sequence
  synthetic peptide
LFHYTDWVDDQRPENYREALGDVVGD

SEQ ID NO: 12156 - protein, 26 aa, Artificial sequence
  synthetic peptide
FHYTDWVDDQRPENYREALGDVVGDY

SEQ ID NO: 12157 - protein, 26 aa, Artificial sequence
  synthetic peptide
HYTDWVDDQRPENYREALGDVVGDYN

SEQ ID NO: 12158 - protein, 26 aa, Artificial sequence
  synthetic peptide
YTDWVDDQRPENYREALGDVVGDYNF

SEQ ID NO: 12159 - protein, 26 aa, Artificial sequence
  synthetic peptide
TDWVDDQRPENYREALGDVVGDYNFI

SEQ ID NO: 12160 - protein, 26 aa, Artificial sequence
  synthetic peptide
DWVDDQRPENYREALGDVVGDYNFIC

SEQ ID NO: 12161 - protein, 26 aa, Artificial sequence
  synthetic peptide
WVDDQRPENYREALGDVVGDYNFICP

SEQ ID NO: 12162 - protein, 26 aa, Artificial sequence
  synthetic peptide
VDDQRPENYREALGDVVGDYNFICPA

SEQ ID NO: 12163 - protein, 26 aa, Artificial sequence
  synthetic peptide
DDQRPENYREALGDVVGDYNFICPAL

SEQ ID NO: 12164 - protein, 26 aa, Artificial sequence
  synthetic peptide
DQRPENYREALGDVVGDYNFICPALE

SEQ ID NO: 12165 - protein, 26 aa, Artificial sequence
  synthetic peptide
QRPENYREALGDVVGDYNFICPALEF

SEQ ID NO: 12166 - protein, 26 aa, Artificial sequence
  synthetic peptide
RPENYREALGDVVGDYNFICPALEFT

SEQ ID NO: 12167 - protein, 26 aa, Artificial sequence
  synthetic peptide
PENYREALGDVVGDYNFICPALEFTK

SEQ ID NO: 12168 - protein, 26 aa, Artificial sequence
  synthetic peptide
ENYREALGDVVGDYNFICPALEFTKK

SEQ ID NO: 12169 - protein, 26 aa, Artificial sequence
  synthetic peptide
NYREALGDVVGDYNFICPALEFTKKF

SEQ ID NO: 12170 - protein, 26 aa, Artificial sequence
  synthetic peptide
YREALGDVVGDYNFICPALEFTKKFS

SEQ ID NO: 12171 - protein, 26 aa, Artificial sequence
  synthetic peptide
REALGDVVGDYNFICPALEFTKKFSE

SEQ ID NO: 12172 - protein, 26 aa, Artificial sequence
  synthetic peptide
EALGDVVGDYNFICPALEFTKKFSEW

SEQ ID NO: 12173 - protein, 26 aa, Artificial sequence
  synthetic peptide
ALGDVVGDYNFICPALEFTKKFSEWG

SEQ ID NO: 12174 - protein, 26 aa, Artificial sequence
  synthetic peptide
LGDVVGDYNFICPALEFTKKFSEWGN

SEQ ID NO: 12175 - protein, 26 aa, Artificial sequence
  synthetic peptide
GDVVGDYNFICPALEFTKKFSEWGNN

SEQ ID NO: 12176 - protein, 26 aa, Artificial sequence
  synthetic peptide
DVVGDYNFICPALEFTKKFSEWGNNA

SEQ ID NO: 12177 - protein, 26 aa, Artificial sequence
  synthetic peptide
VVGDYNFICPALEFTKKFSEWGNNAF

SEQ ID NO: 12178 - protein, 26 aa, Artificial sequence
  synthetic peptide
VGDYNFICPALEFTKKFSEWGNNAFF

SEQ ID NO: 12179 - protein, 26 aa, Artificial sequence
  synthetic peptide
GDYNFICPALEFTKKFSEWGNNAFFY

SEQ ID NO: 12180 - protein, 26 aa, Artificial sequence
  synthetic peptide
DYNFICPALEFTKKFSEWGNNAFFYY

SEQ ID NO: 12181 - protein, 26 aa, Artificial sequence
  synthetic peptide
YNFICPALEFTKKFSEWGNNAFFYYF

SEQ ID NO: 12182 - protein, 26 aa, Artificial sequence
  synthetic peptide
NFICPALEFTKKFSEWGNNAFFYYFE

SEQ ID NO: 12183 - protein, 26 aa, Artificial sequence
  synthetic peptide
FICPALEFTKKFSEWGNNAFFYYFEH

SEQ ID NO: 12184 - protein, 26 aa, Artificial sequence
  synthetic peptide
ICPALEFTKKFSEWGNNAFFYYFEHR

SEQ ID NO: 12185 - protein, 26 aa, Artificial sequence
  synthetic peptide
CPALEFTKKFSEWGNNAFFYYFEHRS

SEQ ID NO: 12186 - protein, 26 aa, Artificial sequence
  synthetic peptide
PALEFTKKFSEWGNNAFFYYFEHRSS

SEQ ID NO: 12187 - protein, 26 aa, Artificial sequence
  synthetic peptide
ALEFTKKFSEWGNNAFFYYFEHRSSK

SEQ ID NO: 12188 - protein, 26 aa, Artificial sequence
  synthetic peptide
LEFTKKFSEWGNNAFFYYFEHRSSKL

SEQ ID NO: 12189 - protein, 26 aa, Artificial sequence
  synthetic peptide
EFTKKFSEWGNNAFFYYFEHRSSKLP

SEQ ID NO: 12190 - protein, 26 aa, Artificial sequence
  synthetic peptide
FTKKFSEWGNNAFFYYFEHRSSKLPW

SEQ ID NO: 12191 - protein, 26 aa, Artificial sequence
  synthetic peptide
TKKFSEWGNNAFFYYFEHRSSKLPWP

SEQ ID NO: 12192 - protein, 26 aa, Artificial sequence
  synthetic peptide
KKFSEWGNNAFFYYFEHRSSKLPWPE

SEQ ID NO: 12193 - protein, 26 aa, Artificial sequence
  synthetic peptide
KFSEWGNNAFFYYFEHRSSKLPWPEW

SEQ ID NO: 12194 - protein, 26 aa, Artificial sequence
  synthetic peptide
FSEWGNNAFFYYFEHRSSKLPWPEWM

SEQ ID NO: 12195 - protein, 26 aa, Artificial sequence
  synthetic peptide
SEWGNNAFFYYFEHRSSKLPWPEWMG

SEQ ID NO: 12196 - protein, 26 aa, Artificial sequence
  synthetic peptide
EWGNNAFFYYFEHRSSKLPWPEWMGV

SEQ ID NO: 12197 - protein, 26 aa, Artificial sequence
  synthetic peptide
WGNNAFFYYFEHRSSKLPWPEWMGVM

SEQ ID NO: 12198 - protein, 26 aa, Artificial sequence
  synthetic peptide
GNNAFFYYFEHRSSKLPWPEWMGVMH

SEQ ID NO: 12199 - protein, 26 aa, Artificial sequence
  synthetic peptide
NNAFFYYFEHRSSKLPWPEWMGVMHG

SEQ ID NO: 12200 - protein, 26 aa, Artificial sequence
  synthetic peptide
NAFFYYFEHRSSKLPWPEWMGVMHGY

SEQ ID NO: 12201 - protein, 26 aa, Artificial sequence
  synthetic peptide
AFFYYFEHRSSKLPWPEWMGVMHGYE

SEQ ID NO: 12202 - protein, 26 aa, Artificial sequence
  synthetic peptide
FFYYFEHRSSKLPWPEWMGVMHGYEI

SEQ ID NO: 12203 - protein, 26 aa, Artificial sequence
  synthetic peptide
FYYFEHRSSKLPWPEWMGVMHGYEIE

SEQ ID NO: 12204 - protein, 26 aa, Artificial sequence
  synthetic peptide
YYFEHRSSKLPWPEWMGVMHGYEIEF

SEQ ID NO: 12205 - protein, 26 aa, Artificial sequence
  synthetic peptide
YFEHRSSKLPWPEWMGVMHGYEIEFV

SEQ ID NO: 12206 - protein, 26 aa, Artificial sequence
  synthetic peptide
FEHRSSKLPWPEWMGVMHGYEIEFVF

SEQ ID NO: 12207 - protein, 26 aa, Artificial sequence
  synthetic peptide
EHRSSKLPWPEWMGVMHGYEIEFVFG

SEQ ID NO: 12208 - protein, 26 aa, Artificial sequence
  synthetic peptide
HRSSKLPWPEWMGVMHGYEIEFVFGL

SEQ ID NO: 12209 - protein, 26 aa, Artificial sequence
  synthetic peptide
RSSKLPWPEWMGVMHGYEIEFVFGLP

SEQ ID NO: 12210 - protein, 26 aa, Artificial sequence
  synthetic peptide
SSKLPWPEWMGVMHGYEIEFVFGLPL

SEQ ID NO: 12211 - protein, 26 aa, Artificial sequence
  synthetic peptide
SKLPWPEWMGVMHGYEIEFVFGLPLE

SEQ ID NO: 12212 - protein, 26 aa, Artificial sequence
  synthetic peptide
KLPWPEWMGVMHGYEIEFVFGLPLER

SEQ ID NO: 12213 - protein, 26 aa, Artificial sequence
  synthetic peptide
LPWPEWMGVMHGYEIEFVFGLPLERR

SEQ ID NO: 12214 - protein, 26 aa, Artificial sequence
  synthetic peptide
PWPEWMGVMHGYEIEFVFGLPLERRD

SEQ ID NO: 12215 - protein, 26 aa, Artificial sequence
  synthetic peptide
WPEWMGVMHGYEIEFVFGLPLERRDN

SEQ ID NO: 12216 - protein, 26 aa, Artificial sequence
  synthetic peptide
PEWMGVMHGYEIEFVFGLPLERRDNY

SEQ ID NO: 12217 - protein, 26 aa, Artificial sequence
  synthetic peptide
EWMGVMHGYEIEFVFGLPLERRDNYT

SEQ ID NO: 12218 - protein, 26 aa, Artificial sequence
  synthetic peptide
WMGVMHGYEIEFVFGLPLERRDNYTK

SEQ ID NO: 12219 - protein, 26 aa, Artificial sequence
  synthetic peptide
MGVMHGYEIEFVFGLPLERRDNYTKA

SEQ ID NO: 12220 - protein, 26 aa, Artificial sequence
  synthetic peptide
GVMHGYEIEFVFGLPLERRDNYTKAE

SEQ ID NO: 12221 - protein, 26 aa, Artificial sequence
  synthetic peptide
VMHGYEIEFVFGLPLERRDNYTKAEE

SEQ ID NO: 12222 - protein, 26 aa, Artificial sequence
  synthetic peptide
MHGYEIEFVFGLPLERRDNYTKAEEI

SEQ ID NO: 12223 - protein, 26 aa, Artificial sequence
  synthetic peptide
HGYEIEFVFGLPLERRDNYTKAEEIL

SEQ ID NO: 12224 - protein, 26 aa, Artificial sequence
  synthetic peptide
GYEIEFVFGLPLERRDNYTKAEEILS

SEQ ID NO: 12225 - protein, 26 aa, Artificial sequence
  synthetic peptide
YEIEFVFGLPLERRDNYTKAEEILSR

SEQ ID NO: 12226 - protein, 26 aa, Artificial sequence
  synthetic peptide
EIEFVFGLPLERRDNYTKAEEILSRS

SEQ ID NO: 12227 - protein, 26 aa, Artificial sequence
  synthetic peptide
IEFVFGLPLERRDNYTKAEEILSRSI

SEQ ID NO: 12228 - protein, 26 aa, Artificial sequence
  synthetic peptide
EFVFGLPLERRDNYTKAEEILSRSIV

SEQ ID NO: 12229 - protein, 26 aa, Artificial sequence
  synthetic peptide
FVFGLPLERRDNYTKAEEILSRSIVK

SEQ ID NO: 12230 - protein, 26 aa, Artificial sequence
  synthetic peptide
VFGLPLERRDNYTKAEEILSRSIVKR

SEQ ID NO: 12231 - protein, 26 aa, Artificial sequence
  synthetic peptide
FGLPLERRDNYTKAEEILSRSIVKRW

SEQ ID NO: 12232 - protein, 26 aa, Artificial sequence
  synthetic peptide
GLPLERRDNYTKAEEILSRSIVKRWA

SEQ ID NO: 12233 - protein, 26 aa, Artificial sequence
  synthetic peptide
LPLERRDNYTKAEEILSRSIVKRWAN

SEQ ID NO: 12234 - protein, 26 aa, Artificial sequence
  synthetic peptide
PLERRDNYTKAEEILSRSIVKRWANF

SEQ ID NO: 12235 - protein, 26 aa, Artificial sequence
  synthetic peptide
LERRDNYTKAEEILSRSIVKRWANFA

SEQ ID NO: 12236 - protein, 26 aa, Artificial sequence
  synthetic peptide
ERRDNYTKAEEILSRSIVKRWANFAK

SEQ ID NO: 12237 - protein, 26 aa, Artificial sequence
  synthetic peptide
RRDNYTKAEEILSRSIVKRWANFAKY

SEQ ID NO: 12238 - protein, 26 aa, Artificial sequence
  synthetic peptide
RDNYTKAEEILSRSIVKRWANFAKYG

SEQ ID NO: 12239 - protein, 26 aa, Artificial sequence
  synthetic peptide
DNYTKAEEILSRSIVKRWANFAKYGN

SEQ ID NO: 12240 - protein, 26 aa, Artificial sequence
  synthetic peptide
NYTKAEEILSRSIVKRWANFAKYGNP

SEQ ID NO: 12241 - protein, 26 aa, Artificial sequence
  synthetic peptide
YTKAEEILSRSIVKRWANFAKYGNPN

SEQ ID NO: 12242 - protein, 26 aa, Artificial sequence
  synthetic peptide
TKAEEILSRSIVKRWANFAKYGNPNE

SEQ ID NO: 12243 - protein, 26 aa, Artificial sequence
  synthetic peptide
KAEEILSRSIVKRWANFAKYGNPNET

SEQ ID NO: 12244 - protein, 26 aa, Artificial sequence
  synthetic peptide
AEEILSRSIVKRWANFAKYGNPNETQ

SEQ ID NO: 12245 - protein, 26 aa, Artificial sequence
  synthetic peptide
EEILSRSIVKRWANFAKYGNPNETQN

SEQ ID NO: 12246 - protein, 26 aa, Artificial sequence
  synthetic peptide
EILSRSIVKRWANFAKYGNPNETQNN

SEQ ID NO: 12247 - protein, 26 aa, Artificial sequence
  synthetic peptide
ILSRSIVKRWANFAKYGNPNETQNNS

SEQ ID NO: 12248 - protein, 26 aa, Artificial sequence
  synthetic peptide
LSRSIVKRWANFAKYGNPNETQNNST

SEQ ID NO: 12249 - protein, 26 aa, Artificial sequence
  synthetic peptide
SRSIVKRWANFAKYGNPNETQNNSTS

SEQ ID NO: 12250 - protein, 26 aa, Artificial sequence
  synthetic peptide
RSIVKRWANFAKYGNPNETQNNSTSW

SEQ ID NO: 12251 - protein, 26 aa, Artificial sequence
  synthetic peptide
SIVKRWANFAKYGNPNETQNNSTSWP

SEQ ID NO: 12252 - protein, 26 aa, Artificial sequence
  synthetic peptide
IVKRWANFAKYGNPNETQNNSTSWPV

SEQ ID NO: 12253 - protein, 26 aa, Artificial sequence
  synthetic peptide
VKRWANFAKYGNPNETQNNSTSWPVF

SEQ ID NO: 12254 - protein, 26 aa, Artificial sequence
  synthetic peptide
KRWANFAKYGNPNETQNNSTSWPVFK

SEQ ID NO: 12255 - protein, 26 aa, Artificial sequence
  synthetic peptide
RWANFAKYGNPNETQNNSTSWPVFKS

SEQ ID NO: 12256 - protein, 26 aa, Artificial sequence
  synthetic peptide
WANFAKYGNPNETQNNSTSWPVFKST

SEQ ID NO: 12257 - protein, 26 aa, Artificial sequence
  synthetic peptide
ANFAKYGNPNETQNNSTSWPVFKSTE

SEQ ID NO: 12258 - protein, 26 aa, Artificial sequence
  synthetic peptide
NFAKYGNPNETQNNSTSWPVFKSTEQ

SEQ ID NO: 12259 - protein, 26 aa, Artificial sequence
  synthetic peptide
FAKYGNPNETQNNSTSWPVFKSTEQK

SEQ ID NO: 12260 - protein, 26 aa, Artificial sequence
  synthetic peptide
AKYGNPNETQNNSTSWPVFKSTEQKY

SEQ ID NO: 12261 - protein, 26 aa, Artificial sequence
  synthetic peptide
KYGNPNETQNNSTSWPVFKSTEQKYL

SEQ ID NO: 12262 - protein, 26 aa, Artificial sequence
  synthetic peptide
YGNPNETQNNSTSWPVFKSTEQKYLT

SEQ ID NO: 12263 - protein, 26 aa, Artificial sequence
  synthetic peptide
GNPNETQNNSTSWPVFKSTEQKYLTL

SEQ ID NO: 12264 - protein, 26 aa, Artificial sequence
  synthetic peptide
NPNETQNNSTSWPVFKSTEQKYLTLN

SEQ ID NO: 12265 - protein, 26 aa, Artificial sequence
  synthetic peptide
PNETQNNSTSWPVFKSTEQKYLTLNT

SEQ ID NO: 12266 - protein, 26 aa, Artificial sequence
  synthetic peptide
NETQNNSTSWPVFKSTEQKYLTLNTE

SEQ ID NO: 12267 - protein, 26 aa, Artificial sequence
  synthetic peptide
ETQNNSTSWPVFKSTEQKYLTLNTES

SEQ ID NO: 12268 - protein, 26 aa, Artificial sequence
  synthetic peptide
TQNNSTSWPVFKSTEQKYLTLNTEST

SEQ ID NO: 12269 - protein, 26 aa, Artificial sequence
  synthetic peptide
QNNSTSWPVFKSTEQKYLTLNTESTR

SEQ ID NO: 12270 - protein, 26 aa, Artificial sequence
  synthetic peptide
NNSTSWPVFKSTEQKYLTLNTESTRI

SEQ ID NO: 12271 - protein, 26 aa, Artificial sequence
  synthetic peptide
NSTSWPVFKSTEQKYLTLNTESTRIM

SEQ ID NO: 12272 - protein, 26 aa, Artificial sequence
  synthetic peptide
STSWPVFKSTEQKYLTLNTESTRIMT

SEQ ID NO: 12273 - protein, 26 aa, Artificial sequence
  synthetic peptide
TSWPVFKSTEQKYLTLNTESTRIMTK

SEQ ID NO: 12274 - protein, 26 aa, Artificial sequence
  synthetic peptide
SWPVFKSTEQKYLTLNTESTRIMTKL

SEQ ID NO: 12275 - protein, 26 aa, Artificial sequence
  synthetic peptide
WPVFKSTEQKYLTLNTESTRIMTKLR

SEQ ID NO: 12276 - protein, 26 aa, Artificial sequence
  synthetic peptide
PVFKSTEQKYLTLNTESTRIMTKLRA

SEQ ID NO: 12277 - protein, 26 aa, Artificial sequence
  synthetic peptide
VFKSTEQKYLTLNTESTRIMTKLRAQ

SEQ ID NO: 12278 - protein, 26 aa, Artificial sequence
  synthetic peptide
FKSTEQKYLTLNTESTRIMTKLRAQQ

SEQ ID NO: 12279 - protein, 26 aa, Artificial sequence
  synthetic peptide
KSTEQKYLTLNTESTRIMTKLRAQQC

SEQ ID NO: 12280 - protein, 26 aa, Artificial sequence
  synthetic peptide
STEQKYLTLNTESTRIMTKLRAQQCR

SEQ ID NO: 12281 - protein, 26 aa, Artificial sequence
  synthetic peptide
TEQKYLTLNTESTRIMTKLRAQQCRF

SEQ ID NO: 12282 - protein, 26 aa, Artificial sequence
  synthetic peptide
EQKYLTLNTESTRIMTKLRAQQCRFW

SEQ ID NO: 12283 - protein, 26 aa, Artificial sequence
  synthetic peptide
QKYLTLNTESTRIMTKLRAQQCRFWT

SEQ ID NO: 12284 - protein, 26 aa, Artificial sequence
  synthetic peptide
KYLTLNTESTRIMTKLRAQQCRFWTS

SEQ ID NO: 12285 - protein, 26 aa, Artificial sequence
  synthetic peptide
YLTLNTESTRIMTKLRAQQCRFWTSF

SEQ ID NO: 12286 - protein, 26 aa, Artificial sequence
  synthetic peptide
LTLNTESTRIMTKLRAQQCRFWTSFF

SEQ ID NO: 12287 - protein, 26 aa, Artificial sequence
  synthetic peptide
TLNTESTRIMTKLRAQQCRFWTSFFP

SEQ ID NO: 12288 - protein, 26 aa, Artificial sequence
  synthetic peptide
LNTESTRIMTKLRAQQCRFWTSFFPK

SEQ ID NO: 12289 - protein, 26 aa, Artificial sequence
  synthetic peptide
NTESTRIMTKLRAQQCRFWTSFFPKV

SEQ ID NO: 12290 - protein, 26 aa, Artificial sequence
  synthetic peptide
TESTRIMTKLRAQQCRFWTSFFPKVL

SEQ ID NO: 12291 - protein, 26 aa, Artificial sequence
  synthetic peptide
ESTRIMTKLRAQQCRFWTSFFPKVLE

SEQ ID NO: 12292 - protein, 26 aa, Artificial sequence
  synthetic peptide
STRIMTKLRAQQCRFWTSFFPKVLEM

SEQ ID NO: 12293 - protein, 26 aa, Artificial sequence
  synthetic peptide
TRIMTKLRAQQCRFWTSFFPKVLEMT

SEQ ID NO: 12294 - protein, 26 aa, Artificial sequence
  synthetic peptide
RIMTKLRAQQCRFWTSFFPKVLEMTG

SEQ ID NO: 12295 - protein, 26 aa, Artificial sequence
  synthetic peptide
IMTKLRAQQCRFWTSFFPKVLEMTGN

SEQ ID NO: 12296 - protein, 26 aa, Artificial sequence
  synthetic peptide
MTKLRAQQCRFWTSFFPKVLEMTGNI

SEQ ID NO: 12297 - protein, 26 aa, Artificial sequence
  synthetic peptide
TKLRAQQCRFWTSFFPKVLEMTGNID

SEQ ID NO: 12298 - protein, 26 aa, Artificial sequence
  synthetic peptide
KLRAQQCRFWTSFFPKVLEMTGNIDE

SEQ ID NO: 12299 - protein, 26 aa, Artificial sequence
  synthetic peptide
LRAQQCRFWTSFFPKVLEMTGNIDEA

SEQ ID NO: 12300 - protein, 26 aa, Artificial sequence
  synthetic peptide
RAQQCRFWTSFFPKVLEMTGNIDEAE

SEQ ID NO: 12301 - protein, 26 aa, Artificial sequence
  synthetic peptide
AQQCRFWTSFFPKVLEMTGNIDEAEW

SEQ ID NO: 12302 - protein, 26 aa, Artificial sequence
  synthetic peptide
QQCRFWTSFFPKVLEMTGNIDEAEWE

SEQ ID NO: 12303 - protein, 26 aa, Artificial sequence
  synthetic peptide
QCRFWTSFFPKVLEMTGNIDEAEWEW

SEQ ID NO: 12304 - protein, 26 aa, Artificial sequence
  synthetic peptide
CRFWTSFFPKVLEMTGNIDEAEWEWK

SEQ ID NO: 12305 - protein, 26 aa, Artificial sequence
  synthetic peptide
RFWTSFFPKVLEMTGNIDEAEWEWKA

SEQ ID NO: 12306 - protein, 26 aa, Artificial sequence
  synthetic peptide
FWTSFFPKVLEMTGNIDEAEWEWKAG

SEQ ID NO: 12307 - protein, 26 aa, Artificial sequence
  synthetic peptide
WTSFFPKVLEMTGNIDEAEWEWKAGF

SEQ ID NO: 12308 - protein, 26 aa, Artificial sequence
  synthetic peptide
TSFFPKVLEMTGNIDEAEWEWKAGFH

SEQ ID NO: 12309 - protein, 26 aa, Artificial sequence
  synthetic peptide
SFFPKVLEMTGNIDEAEWEWKAGFHR

SEQ ID NO: 12310 - protein, 26 aa, Artificial sequence
  synthetic peptide
FFPKVLEMTGNIDEAEWEWKAGFHRW

SEQ ID NO: 12311 - protein, 26 aa, Artificial sequence
  synthetic peptide
FPKVLEMTGNIDEAEWEWKAGFHRWN

SEQ ID NO: 12312 - protein, 26 aa, Artificial sequence
  synthetic peptide
PKVLEMTGNIDEAEWEWKAGFHRWNN

SEQ ID NO: 12313 - protein, 26 aa, Artificial sequence
  synthetic peptide
KVLEMTGNIDEAEWEWKAGFHRWNNY

SEQ ID NO: 12314 - protein, 26 aa, Artificial sequence
  synthetic peptide
VLEMTGNIDEAEWEWKAGFHRWNNYM

SEQ ID NO: 12315 - protein, 26 aa, Artificial sequence
  synthetic peptide
LEMTGNIDEAEWEWKAGFHRWNNYMM

SEQ ID NO: 12316 - protein, 26 aa, Artificial sequence
  synthetic peptide
EMTGNIDEAEWEWKAGFHRWNNYMMD

SEQ ID NO: 12317 - protein, 26 aa, Artificial sequence
  synthetic peptide
MTGNIDEAEWEWKAGFHRWNNYMMDW

SEQ ID NO: 12318 - protein, 26 aa, Artificial sequence
  synthetic peptide
TGNIDEAEWEWKAGFHRWNNYMMDWK

SEQ ID NO: 12319 - protein, 26 aa, Artificial sequence
  synthetic peptide
GNIDEAEWEWKAGFHRWNNYMMDWKN

SEQ ID NO: 12320 - protein, 26 aa, Artificial sequence
  synthetic peptide
NIDEAEWEWKAGFHRWNNYMMDWKNQ

SEQ ID NO: 12321 - protein, 26 aa, Artificial sequence
  synthetic peptide
IDEAEWEWKAGFHRWNNYMMDWKNQF

SEQ ID NO: 12322 - protein, 26 aa, Artificial sequence
  synthetic peptide
DEAEWEWKAGFHRWNNYMMDWKNQFN

SEQ ID NO: 12323 - protein, 26 aa, Artificial sequence
  synthetic peptide
EAEWEWKAGFHRWNNYMMDWKNQFND

SEQ ID NO: 12324 - protein, 26 aa, Artificial sequence
  synthetic peptide
AEWEWKAGFHRWNNYMMDWKNQFNDY

SEQ ID NO: 12325 - protein, 26 aa, Artificial sequence
  synthetic peptide
EWEWKAGFHRWNNYMMDWKNQFNDYT

SEQ ID NO: 12326 - protein, 26 aa, Artificial sequence
  synthetic peptide
WEWKAGFHRWNNYMMDWKNQFNDYTS

SEQ ID NO: 12327 - protein, 26 aa, Artificial sequence
  synthetic peptide
EWKAGFHRWNNYMMDWKNQFNDYTSK

SEQ ID NO: 12328 - protein, 26 aa, Artificial sequence
  synthetic peptide
WKAGFHRWNNYMMDWKNQFNDYTSKK

SEQ ID NO: 12329 - protein, 26 aa, Artificial sequence
  synthetic peptide
KAGFHRWNNYMMDWKNQFNDYTSKKE

SEQ ID NO: 12330 - protein, 26 aa, Artificial sequence
  synthetic peptide
AGFHRWNNYMMDWKNQFNDYTSKKES

SEQ ID NO: 12331 - protein, 26 aa, Artificial sequence
  synthetic peptide
GFHRWNNYMMDWKNQFNDYTSKKESC

SEQ ID NO: 12332 - protein, 26 aa, Artificial sequence
  synthetic peptide
FHRWNNYMMDWKNQFNDYTSKKESCV

SEQ ID NO: 12333 - protein, 26 aa, Artificial sequence
  synthetic peptide
HRWNNYMMDWKNQFNDYTSKKESCVG

SEQ ID NO: 12334 - protein, 26 aa, Artificial sequence
  synthetic peptide
RWNNYMMDWKNQFNDYTSKKESCVGL

SEQ ID NO: 12335 - protein, 27 aa, Artificial sequence
  synthetic peptide
MHSKVTIICIRFLFWFLLLCMLIGKSH

SEQ ID NO: 12336 - protein, 27 aa, Artificial sequence
  synthetic peptide
HSKVTIICIRFLFWFLLLCMLIGKSHT

SEQ ID NO: 12337 - protein, 27 aa, Artificial sequence
  synthetic peptide
SKVTIICIRFLFWFLLLCMLIGKSHTE

SEQ ID NO: 12338 - protein, 27 aa, Artificial sequence
  synthetic peptide
KVTIICIRFLFWFLLLCMLIGKSHTED

SEQ ID NO: 12339 - protein, 27 aa, Artificial sequence
  synthetic peptide
VTIICIRFLFWFLLLCMLIGKSHTEDD

SEQ ID NO: 12340 - protein, 27 aa, Artificial sequence
  synthetic peptide
TIICIRFLFWFLLLCMLIGKSHTEDDI

SEQ ID NO: 12341 - protein, 27 aa, Artificial sequence
  synthetic peptide
IICIRFLFWFLLLCMLIGKSHTEDDII

SEQ ID NO: 12342 - protein, 27 aa, Artificial sequence
  synthetic peptide
ICIRFLFWFLLLCMLIGKSHTEDDIII

SEQ ID NO: 12343 - protein, 27 aa, Artificial sequence
  synthetic peptide
CIRFLFWFLLLCMLIGKSHTEDDIIIA

SEQ ID NO: 12344 - protein, 27 aa, Artificial sequence
  synthetic peptide
IRFLFWFLLLCMLIGKSHTEDDIIIAT

SEQ ID NO: 12345 - protein, 27 aa, Artificial sequence
  synthetic peptide
RFLFWFLLLCMLIGKSHTEDDIIIATK

SEQ ID NO: 12346 - protein, 27 aa, Artificial sequence
  synthetic peptide
FLFWFLLLCMLIGKSHTEDDIIIATKN

SEQ ID NO: 12347 - protein, 27 aa, Artificial sequence
  synthetic peptide
LFWFLLLCMLIGKSHTEDDIIIATKNG

SEQ ID NO: 12348 - protein, 27 aa, Artificial sequence
  synthetic peptide
FWFLLLCMLIGKSHTEDDIIIATKNGK

SEQ ID NO: 12349 - protein, 27 aa, Artificial sequence
  synthetic peptide
WFLLLCMLIGKSHTEDDIIIATKNGKV

SEQ ID NO: 12350 - protein, 27 aa, Artificial sequence
  synthetic peptide
FLLLCMLIGKSHTEDDIIIATKNGKVR

SEQ ID NO: 12351 - protein, 27 aa, Artificial sequence
  synthetic peptide
LLLCMLIGKSHTEDDIIIATKNGKVRG

SEQ ID NO: 12352 - protein, 27 aa, Artificial sequence
  synthetic peptide
LLCMLIGKSHTEDDIIIATKNGKVRGM

SEQ ID NO: 12353 - protein, 27 aa, Artificial sequence
  synthetic peptide
LCMLIGKSHTEDDIIIATKNGKVRGMN

SEQ ID NO: 12354 - protein, 27 aa, Artificial sequence
  synthetic peptide
CMLIGKSHTEDDIIIATKNGKVRGMNL

SEQ ID NO: 12355 - protein, 27 aa, Artificial sequence
  synthetic peptide
MLIGKSHTEDDIIIATKNGKVRGMNLT

SEQ ID NO: 12356 - protein, 27 aa, Artificial sequence
  synthetic peptide
LIGKSHTEDDIIIATKNGKVRGMNLTV

SEQ ID NO: 12357 - protein, 27 aa, Artificial sequence
  synthetic peptide
IGKSHTEDDIIIATKNGKVRGMNLTVF

SEQ ID NO: 12358 - protein, 27 aa, Artificial sequence
  synthetic peptide
GKSHTEDDIIIATKNGKVRGMNLTVFG

SEQ ID NO: 12359 - protein, 27 aa, Artificial sequence
  synthetic peptide
KSHTEDDIIIATKNGKVRGMNLTVFGG

SEQ ID NO: 12360 - protein, 27 aa, Artificial sequence
  synthetic peptide
SHTEDDIIIATKNGKVRGMNLTVFGGT

SEQ ID NO: 12361 - protein, 27 aa, Artificial sequence
  synthetic peptide
HTEDDIIIATKNGKVRGMNLTVFGGTV

SEQ ID NO: 12362 - protein, 27 aa, Artificial sequence
  synthetic peptide
TEDDIIIATKNGKVRGMNLTVFGGTVT

SEQ ID NO: 12363 - protein, 27 aa, Artificial sequence
  synthetic peptide
EDDIIIATKNGKVRGMNLTVFGGTVTA

SEQ ID NO: 12364 - protein, 27 aa, Artificial sequence
  synthetic peptide
DDIIIATKNGKVRGMNLTVFGGTVTAF

SEQ ID NO: 12365 - protein, 27 aa, Artificial sequence
  synthetic peptide
DIIIATKNGKVRGMNLTVFGGTVTAFL

SEQ ID NO: 12366 - protein, 27 aa, Artificial sequence
  synthetic peptide
IIIATKNGKVRGMNLTVFGGTVTAFLG

SEQ ID NO: 12367 - protein, 27 aa, Artificial sequence
  synthetic peptide
IIATKNGKVRGMNLTVFGGTVTAFLGI

SEQ ID NO: 12368 - protein, 27 aa, Artificial sequence
  synthetic peptide
IATKNGKVRGMNLTVFGGTVTAFLGIP

SEQ ID NO: 12369 - protein, 27 aa, Artificial sequence
  synthetic peptide
ATKNGKVRGMNLTVFGGTVTAFLGIPY

SEQ ID NO: 12370 - protein, 27 aa, Artificial sequence
  synthetic peptide
TKNGKVRGMNLTVFGGTVTAFLGIPYA

SEQ ID NO: 12371 - protein, 27 aa, Artificial sequence
  synthetic peptide
KNGKVRGMNLTVFGGTVTAFLGIPYAQ

SEQ ID NO: 12372 - protein, 27 aa, Artificial sequence
  synthetic peptide
NGKVRGMNLTVFGGTVTAFLGIPYAQP

SEQ ID NO: 12373 - protein, 27 aa, Artificial sequence
  synthetic peptide
GKVRGMNLTVFGGTVTAFLGIPYAQPP

SEQ ID NO: 12374 - protein, 27 aa, Artificial sequence
  synthetic peptide
KVRGMNLTVFGGTVTAFLGIPYAQPPL

SEQ ID NO: 12375 - protein, 27 aa, Artificial sequence
  synthetic peptide
VRGMNLTVFGGTVTAFLGIPYAQPPLG

SEQ ID NO: 12376 - protein, 27 aa, Artificial sequence
  synthetic peptide
RGMNLTVFGGTVTAFLGIPYAQPPLGR

SEQ ID NO: 12377 - protein, 27 aa, Artificial sequence
  synthetic peptide
GMNLTVFGGTVTAFLGIPYAQPPLGRL

SEQ ID NO: 12378 - protein, 27 aa, Artificial sequence
  synthetic peptide
MNLTVFGGTVTAFLGIPYAQPPLGRLR

SEQ ID NO: 12379 - protein, 27 aa, Artificial sequence
  synthetic peptide
NLTVFGGTVTAFLGIPYAQPPLGRLRF

SEQ ID NO: 12380 - protein, 27 aa, Artificial sequence
  synthetic peptide
LTVFGGTVTAFLGIPYAQPPLGRLRFK

SEQ ID NO: 12381 - protein, 27 aa, Artificial sequence
  synthetic peptide
TVFGGTVTAFLGIPYAQPPLGRLRFKK

SEQ ID NO: 12382 - protein, 27 aa, Artificial sequence
  synthetic peptide
VFGGTVTAFLGIPYAQPPLGRLRFKKP

SEQ ID NO: 12383 - protein, 27 aa, Artificial sequence
  synthetic peptide
FGGTVTAFLGIPYAQPPLGRLRFKKPQ

SEQ ID NO: 12384 - protein, 27 aa, Artificial sequence
  synthetic peptide
GGTVTAFLGIPYAQPPLGRLRFKKPQS

SEQ ID NO: 12385 - protein, 27 aa, Artificial sequence
  synthetic peptide
GTVTAFLGIPYAQPPLGRLRFKKPQSL

SEQ ID NO: 12386 - protein, 27 aa, Artificial sequence
  synthetic peptide
TVTAFLGIPYAQPPLGRLRFKKPQSLT

SEQ ID NO: 12387 - protein, 27 aa, Artificial sequence
  synthetic peptide
VTAFLGIPYAQPPLGRLRFKKPQSLTK

SEQ ID NO: 12388 - protein, 27 aa, Artificial sequence
  synthetic peptide
TAFLGIPYAQPPLGRLRFKKPQSLTKW

SEQ ID NO: 12389 - protein, 27 aa, Artificial sequence
  synthetic peptide
AFLGIPYAQPPLGRLRFKKPQSLTKWS

SEQ ID NO: 12390 - protein, 27 aa, Artificial sequence
  synthetic peptide
FLGIPYAQPPLGRLRFKKPQSLTKWSD

SEQ ID NO: 12391 - protein, 27 aa, Artificial sequence
  synthetic peptide
LGIPYAQPPLGRLRFKKPQSLTKWSDI

SEQ ID NO: 12392 - protein, 27 aa, Artificial sequence
  synthetic peptide
GIPYAQPPLGRLRFKKPQSLTKWSDIW

SEQ ID NO: 12393 - protein, 27 aa, Artificial sequence
  synthetic peptide
IPYAQPPLGRLRFKKPQSLTKWSDIWN

SEQ ID NO: 12394 - protein, 27 aa, Artificial sequence
  synthetic peptide
PYAQPPLGRLRFKKPQSLTKWSDIWNA

SEQ ID NO: 12395 - protein, 27 aa, Artificial sequence
  synthetic peptide
YAQPPLGRLRFKKPQSLTKWSDIWNAT

SEQ ID NO: 12396 - protein, 27 aa, Artificial sequence
  synthetic peptide
AQPPLGRLRFKKPQSLTKWSDIWNATK

SEQ ID NO: 12397 - protein, 27 aa, Artificial sequence
  synthetic peptide
QPPLGRLRFKKPQSLTKWSDIWNATKY

SEQ ID NO: 12398 - protein, 27 aa, Artificial sequence
  synthetic peptide
PPLGRLRFKKPQSLTKWSDIWNATKYA

SEQ ID NO: 12399 - protein, 27 aa, Artificial sequence
  synthetic peptide
PLGRLRFKKPQSLTKWSDIWNATKYAN

SEQ ID NO: 12400 - protein, 27 aa, Artificial sequence
  synthetic peptide
LGRLRFKKPQSLTKWSDIWNATKYANS

SEQ ID NO: 12401 - protein, 27 aa, Artificial sequence
  synthetic peptide
GRLRFKKPQSLTKWSDIWNATKYANSC

SEQ ID NO: 12402 - protein, 27 aa, Artificial sequence
  synthetic peptide
RLRFKKPQSLTKWSDIWNATKYANSCC

SEQ ID NO: 12403 - protein, 27 aa, Artificial sequence
  synthetic peptide
LRFKKPQSLTKWSDIWNATKYANSCCQ

SEQ ID NO: 12404 - protein, 27 aa, Artificial sequence
  synthetic peptide
RFKKPQSLTKWSDIWNATKYANSCCQN

SEQ ID NO: 12405 - protein, 27 aa, Artificial sequence
  synthetic peptide
FKKPQSLTKWSDIWNATKYANSCCQNI

SEQ ID NO: 12406 - protein, 27 aa, Artificial sequence
  synthetic peptide
KKPQSLTKWSDIWNATKYANSCCQNID

SEQ ID NO: 12407 - protein, 27 aa, Artificial sequence
  synthetic peptide
KPQSLTKWSDIWNATKYANSCCQNIDQ

SEQ ID NO: 12408 - protein, 27 aa, Artificial sequence
  synthetic peptide
PQSLTKWSDIWNATKYANSCCQNIDQS

SEQ ID NO: 12409 - protein, 27 aa, Artificial sequence
  synthetic peptide
QSLTKWSDIWNATKYANSCCQNIDQSF

SEQ ID NO: 12410 - protein, 27 aa, Artificial sequence
  synthetic peptide
SLTKWSDIWNATKYANSCCQNIDQSFP

SEQ ID NO: 12411 - protein, 27 aa, Artificial sequence
  synthetic peptide
LTKWSDIWNATKYANSCCQNIDQSFPG

SEQ ID NO: 12412 - protein, 27 aa, Artificial sequence
  synthetic peptide
TKWSDIWNATKYANSCCQNIDQSFPGF

SEQ ID NO: 12413 - protein, 27 aa, Artificial sequence
  synthetic peptide
KWSDIWNATKYANSCCQNIDQSFPGFH

SEQ ID NO: 12414 - protein, 27 aa, Artificial sequence
  synthetic peptide
WSDIWNATKYANSCCQNIDQSFPGFHG

SEQ ID NO: 12415 - protein, 27 aa, Artificial sequence
  synthetic peptide
SDIWNATKYANSCCQNIDQSFPGFHGS

SEQ ID NO: 12416 - protein, 27 aa, Artificial sequence
  synthetic peptide
DIWNATKYANSCCQNIDQSFPGFHGSE

SEQ ID NO: 12417 - protein, 27 aa, Artificial sequence
  synthetic peptide
IWNATKYANSCCQNIDQSFPGFHGSEM

SEQ ID NO: 12418 - protein, 27 aa, Artificial sequence
  synthetic peptide
WNATKYANSCCQNIDQSFPGFHGSEMW

SEQ ID NO: 12419 - protein, 27 aa, Artificial sequence
  synthetic peptide
NATKYANSCCQNIDQSFPGFHGSEMWN

SEQ ID NO: 12420 - protein, 27 aa, Artificial sequence
  synthetic peptide
ATKYANSCCQNIDQSFPGFHGSEMWNP

SEQ ID NO: 12421 - protein, 27 aa, Artificial sequence
  synthetic peptide
TKYANSCCQNIDQSFPGFHGSEMWNPN

SEQ ID NO: 12422 - protein, 27 aa, Artificial sequence
  synthetic peptide
KYANSCCQNIDQSFPGFHGSEMWNPNT

SEQ ID NO: 12423 - protein, 27 aa, Artificial sequence
  synthetic peptide
YANSCCQNIDQSFPGFHGSEMWNPNTD

SEQ ID NO: 12424 - protein, 27 aa, Artificial sequence
  synthetic peptide
ANSCCQNIDQSFPGFHGSEMWNPNTDL

SEQ ID NO: 12425 - protein, 27 aa, Artificial sequence
  synthetic peptide
NSCCQNIDQSFPGFHGSEMWNPNTDLS

SEQ ID NO: 12426 - protein, 27 aa, Artificial sequence
  synthetic peptide
SCCQNIDQSFPGFHGSEMWNPNTDLSE

SEQ ID NO: 12427 - protein, 27 aa, Artificial sequence
  synthetic peptide
CCQNIDQSFPGFHGSEMWNPNTDLSED

SEQ ID NO: 12428 - protein, 27 aa, Artificial sequence
  synthetic peptide
CQNIDQSFPGFHGSEMWNPNTDLSEDC

SEQ ID NO: 12429 - protein, 27 aa, Artificial sequence
  synthetic peptide
QNIDQSFPGFHGSEMWNPNTDLSEDCL

SEQ ID NO: 12430 - protein, 27 aa, Artificial sequence
  synthetic peptide
NIDQSFPGFHGSEMWNPNTDLSEDCLY

SEQ ID NO: 12431 - protein, 27 aa, Artificial sequence
  synthetic peptide
IDQSFPGFHGSEMWNPNTDLSEDCLYL

SEQ ID NO: 12432 - protein, 27 aa, Artificial sequence
  synthetic peptide
DQSFPGFHGSEMWNPNTDLSEDCLYLN

SEQ ID NO: 12433 - protein, 27 aa, Artificial sequence
  synthetic peptide
QSFPGFHGSEMWNPNTDLSEDCLYLNV

SEQ ID NO: 12434 - protein, 27 aa, Artificial sequence
  synthetic peptide
SFPGFHGSEMWNPNTDLSEDCLYLNVW

SEQ ID NO: 12435 - protein, 27 aa, Artificial sequence
  synthetic peptide
FPGFHGSEMWNPNTDLSEDCLYLNVWI

SEQ ID NO: 12436 - protein, 27 aa, Artificial sequence
  synthetic peptide
PGFHGSEMWNPNTDLSEDCLYLNVWIP

SEQ ID NO: 12437 - protein, 27 aa, Artificial sequence
  synthetic peptide
GFHGSEMWNPNTDLSEDCLYLNVWIPA

SEQ ID NO: 12438 - protein, 27 aa, Artificial sequence
  synthetic peptide
FHGSEMWNPNTDLSEDCLYLNVWIPAP

SEQ ID NO: 12439 - protein, 27 aa, Artificial sequence
  synthetic peptide
HGSEMWNPNTDLSEDCLYLNVWIPAPK

SEQ ID NO: 12440 - protein, 27 aa, Artificial sequence
  synthetic peptide
GSEMWNPNTDLSEDCLYLNVWIPAPKP

SEQ ID NO: 12441 - protein, 27 aa, Artificial sequence
  synthetic peptide
SEMWNPNTDLSEDCLYLNVWIPAPKPK

SEQ ID NO: 12442 - protein, 27 aa, Artificial sequence
  synthetic peptide
EMWNPNTDLSEDCLYLNVWIPAPKPKN

SEQ ID NO: 12443 - protein, 27 aa, Artificial sequence
  synthetic peptide
MWNPNTDLSEDCLYLNVWIPAPKPKNA

SEQ ID NO: 12444 - protein, 27 aa, Artificial sequence
  synthetic peptide
WNPNTDLSEDCLYLNVWIPAPKPKNAT

SEQ ID NO: 12445 - protein, 27 aa, Artificial sequence
  synthetic peptide
NPNTDLSEDCLYLNVWIPAPKPKNATV

SEQ ID NO: 12446 - protein, 27 aa, Artificial sequence
  synthetic peptide
PNTDLSEDCLYLNVWIPAPKPKNATVL

SEQ ID NO: 12447 - protein, 27 aa, Artificial sequence
  synthetic peptide
NTDLSEDCLYLNVWIPAPKPKNATVLI

SEQ ID NO: 12448 - protein, 27 aa, Artificial sequence
  synthetic peptide
TDLSEDCLYLNVWIPAPKPKNATVLIW

SEQ ID NO: 12449 - protein, 27 aa, Artificial sequence
  synthetic peptide
DLSEDCLYLNVWIPAPKPKNATVLIWI

SEQ ID NO: 12450 - protein, 27 aa, Artificial sequence
  synthetic peptide
LSEDCLYLNVWIPAPKPKNATVLIWIY

SEQ ID NO: 12451 - protein, 27 aa, Artificial sequence
  synthetic peptide
SEDCLYLNVWIPAPKPKNATVLIWIYG

SEQ ID NO: 12452 - protein, 27 aa, Artificial sequence
  synthetic peptide
EDCLYLNVWIPAPKPKNATVLIWIYGG

SEQ ID NO: 12453 - protein, 27 aa, Artificial sequence
  synthetic peptide
DCLYLNVWIPAPKPKNATVLIWIYGGG

SEQ ID NO: 12454 - protein, 27 aa, Artificial sequence
  synthetic peptide
CLYLNVWIPAPKPKNATVLIWIYGGGF

SEQ ID NO: 12455 - protein, 27 aa, Artificial sequence
  synthetic peptide
LYLNVWIPAPKPKNATVLIWIYGGGFQ

SEQ ID NO: 12456 - protein, 27 aa, Artificial sequence
  synthetic peptide
YLNVWIPAPKPKNATVLIWIYGGGFQT

SEQ ID NO: 12457 - protein, 27 aa, Artificial sequence
  synthetic peptide
LNVWIPAPKPKNATVLIWIYGGGFQTG

SEQ ID NO: 12458 - protein, 27 aa, Artificial sequence
  synthetic peptide
NVWIPAPKPKNATVLIWIYGGGFQTGT

SEQ ID NO: 12459 - protein, 27 aa, Artificial sequence
  synthetic peptide
VWIPAPKPKNATVLIWIYGGGFQTGTS

SEQ ID NO: 12460 - protein, 27 aa, Artificial sequence
  synthetic peptide
WIPAPKPKNATVLIWIYGGGFQTGTSS

SEQ ID NO: 12461 - protein, 27 aa, Artificial sequence
  synthetic peptide
IPAPKPKNATVLIWIYGGGFQTGTSSL

SEQ ID NO: 12462 - protein, 27 aa, Artificial sequence
  synthetic peptide
PAPKPKNATVLIWIYGGGFQTGTSSLH

SEQ ID NO: 12463 - protein, 27 aa, Artificial sequence
  synthetic peptide
APKPKNATVLIWIYGGGFQTGTSSLHV

SEQ ID NO: 12464 - protein, 27 aa, Artificial sequence
  synthetic peptide
PKPKNATVLIWIYGGGFQTGTSSLHVY

SEQ ID NO: 12465 - protein, 27 aa, Artificial sequence
  synthetic peptide
KPKNATVLIWIYGGGFQTGTSSLHVYD

SEQ ID NO: 12466 - protein, 27 aa, Artificial sequence
  synthetic peptide
PKNATVLIWIYGGGFQTGTSSLHVYDG

SEQ ID NO: 12467 - protein, 27 aa, Artificial sequence
  synthetic peptide
KNATVLIWIYGGGFQTGTSSLHVYDGK

SEQ ID NO: 12468 - protein, 27 aa, Artificial sequence
  synthetic peptide
NATVLIWIYGGGFQTGTSSLHVYDGKF

SEQ ID NO: 12469 - protein, 27 aa, Artificial sequence
  synthetic peptide
ATVLIWIYGGGFQTGTSSLHVYDGKFL

SEQ ID NO: 12470 - protein, 27 aa, Artificial sequence
  synthetic peptide
TVLIWIYGGGFQTGTSSLHVYDGKFLA

SEQ ID NO: 12471 - protein, 27 aa, Artificial sequence
  synthetic peptide
VLIWIYGGGFQTGTSSLHVYDGKFLAR

SEQ ID NO: 12472 - protein, 27 aa, Artificial sequence
  synthetic peptide
LIWIYGGGFQTGTSSLHVYDGKFLARV

SEQ ID NO: 12473 - protein, 27 aa, Artificial sequence
  synthetic peptide
IWIYGGGFQTGTSSLHVYDGKFLARVE

SEQ ID NO: 12474 - protein, 27 aa, Artificial sequence
  synthetic peptide
WIYGGGFQTGTSSLHVYDGKFLARVER

SEQ ID NO: 12475 - protein, 27 aa, Artificial sequence
  synthetic peptide
IYGGGFQTGTSSLHVYDGKFLARVERV

SEQ ID NO: 12476 - protein, 27 aa, Artificial sequence
  synthetic peptide
YGGGFQTGTSSLHVYDGKFLARVERVI

SEQ ID NO: 12477 - protein, 27 aa, Artificial sequence
  synthetic peptide
GGGFQTGTSSLHVYDGKFLARVERVIV

SEQ ID NO: 12478 - protein, 27 aa, Artificial sequence
  synthetic peptide
GGFQTGTSSLHVYDGKFLARVERVIVV

SEQ ID NO: 12479 - protein, 27 aa, Artificial sequence
  synthetic peptide
GFQTGTSSLHVYDGKFLARVERVIVVS

SEQ ID NO: 12480 - protein, 27 aa, Artificial sequence
  synthetic peptide
FQTGTSSLHVYDGKFLARVERVIVVSM

SEQ ID NO: 12481 - protein, 27 aa, Artificial sequence
  synthetic peptide
QTGTSSLHVYDGKFLARVERVIVVSMN

SEQ ID NO: 12482 - protein, 27 aa, Artificial sequence
  synthetic peptide
TGTSSLHVYDGKFLARVERVIVVSMNY

SEQ ID NO: 12483 - protein, 27 aa, Artificial sequence
  synthetic peptide
GTSSLHVYDGKFLARVERVIVVSMNYR

SEQ ID NO: 12484 - protein, 27 aa, Artificial sequence
  synthetic peptide
TSSLHVYDGKFLARVERVIVVSMNYRV

SEQ ID NO: 12485 - protein, 27 aa, Artificial sequence
  synthetic peptide
SSLHVYDGKFLARVERVIVVSMNYRVG

SEQ ID NO: 12486 - protein, 27 aa, Artificial sequence
  synthetic peptide
SLHVYDGKFLARVERVIVVSMNYRVGA

SEQ ID NO: 12487 - protein, 27 aa, Artificial sequence
  synthetic peptide
LHVYDGKFLARVERVIVVSMNYRVGAL

SEQ ID NO: 12488 - protein, 27 aa, Artificial sequence
  synthetic peptide
HVYDGKFLARVERVIVVSMNYRVGALG

SEQ ID NO: 12489 - protein, 27 aa, Artificial sequence
  synthetic peptide
VYDGKFLARVERVIVVSMNYRVGALGF

SEQ ID NO: 12490 - protein, 27 aa, Artificial sequence
  synthetic peptide
YDGKFLARVERVIVVSMNYRVGALGFL

SEQ ID NO: 12491 - protein, 27 aa, Artificial sequence
  synthetic peptide
DGKFLARVERVIVVSMNYRVGALGFLA

SEQ ID NO: 12492 - protein, 27 aa, Artificial sequence
  synthetic peptide
GKFLARVERVIVVSMNYRVGALGFLAL

SEQ ID NO: 12493 - protein, 27 aa, Artificial sequence
  synthetic peptide
KFLARVERVIVVSMNYRVGALGFLALP

SEQ ID NO: 12494 - protein, 27 aa, Artificial sequence
  synthetic peptide
FLARVERVIVVSMNYRVGALGFLALPG

SEQ ID NO: 12495 - protein, 27 aa, Artificial sequence
  synthetic peptide
LARVERVIVVSMNYRVGALGFLALPGN

SEQ ID NO: 12496 - protein, 27 aa, Artificial sequence
  synthetic peptide
ARVERVIVVSMNYRVGALGFLALPGNP

SEQ ID NO: 12497 - protein, 27 aa, Artificial sequence
  synthetic peptide
RVERVIVVSMNYRVGALGFLALPGNPE

SEQ ID NO: 12498 - protein, 27 aa, Artificial sequence
  synthetic peptide
VERVIVVSMNYRVGALGFLALPGNPEA

SEQ ID NO: 12499 - protein, 27 aa, Artificial sequence
  synthetic peptide
ERVIVVSMNYRVGALGFLALPGNPEAP

SEQ ID NO: 12500 - protein, 27 aa, Artificial sequence
  synthetic peptide
RVIVVSMNYRVGALGFLALPGNPEAPG

SEQ ID NO: 12501 - protein, 27 aa, Artificial sequence
  synthetic peptide
VIVVSMNYRVGALGFLALPGNPEAPGN

SEQ ID NO: 12502 - protein, 27 aa, Artificial sequence
  synthetic peptide
IVVSMNYRVGALGFLALPGNPEAPGNM

SEQ ID NO: 12503 - protein, 27 aa, Artificial sequence
  synthetic peptide
VVSMNYRVGALGFLALPGNPEAPGNMG

SEQ ID NO: 12504 - protein, 27 aa, Artificial sequence
  synthetic peptide
VSMNYRVGALGFLALPGNPEAPGNMGL

SEQ ID NO: 12505 - protein, 27 aa, Artificial sequence
  synthetic peptide
SMNYRVGALGFLALPGNPEAPGNMGLF

SEQ ID NO: 12506 - protein, 27 aa, Artificial sequence
  synthetic peptide
MNYRVGALGFLALPGNPEAPGNMGLFD

SEQ ID NO: 12507 - protein, 27 aa, Artificial sequence
  synthetic peptide
NYRVGALGFLALPGNPEAPGNMGLFDQ

SEQ ID NO: 12508 - protein, 27 aa, Artificial sequence
  synthetic peptide
YRVGALGFLALPGNPEAPGNMGLFDQQ

SEQ ID NO: 12509 - protein, 27 aa, Artificial sequence
  synthetic peptide
RVGALGFLALPGNPEAPGNMGLFDQQL

SEQ ID NO: 12510 - protein, 27 aa, Artificial sequence
  synthetic peptide
VGALGFLALPGNPEAPGNMGLFDQQLA

SEQ ID NO: 12511 - protein, 27 aa, Artificial sequence
  synthetic peptide
GALGFLALPGNPEAPGNMGLFDQQLAL

SEQ ID NO: 12512 - protein, 27 aa, Artificial sequence
  synthetic peptide
ALGFLALPGNPEAPGNMGLFDQQLALQ

SEQ ID NO: 12513 - protein, 27 aa, Artificial sequence
  synthetic peptide
LGFLALPGNPEAPGNMGLFDQQLALQW

SEQ ID NO: 12514 - protein, 27 aa, Artificial sequence
  synthetic peptide
GFLALPGNPEAPGNMGLFDQQLALQWV

SEQ ID NO: 12515 - protein, 27 aa, Artificial sequence
  synthetic peptide
FLALPGNPEAPGNMGLFDQQLALQWVQ

SEQ ID NO: 12516 - protein, 27 aa, Artificial sequence
  synthetic peptide
LALPGNPEAPGNMGLFDQQLALQWVQK

SEQ ID NO: 12517 - protein, 27 aa, Artificial sequence
  synthetic peptide
ALPGNPEAPGNMGLFDQQLALQWVQKN

SEQ ID NO: 12518 - protein, 27 aa, Artificial sequence
  synthetic peptide
LPGNPEAPGNMGLFDQQLALQWVQKNI

SEQ ID NO: 12519 - protein, 27 aa, Artificial sequence
  synthetic peptide
PGNPEAPGNMGLFDQQLALQWVQKNIA

SEQ ID NO: 12520 - protein, 27 aa, Artificial sequence
  synthetic peptide
GNPEAPGNMGLFDQQLALQWVQKNIAA

SEQ ID NO: 12521 - protein, 27 aa, Artificial sequence
  synthetic peptide
NPEAPGNMGLFDQQLALQWVQKNIAAF

SEQ ID NO: 12522 - protein, 27 aa, Artificial sequence
  synthetic peptide
PEAPGNMGLFDQQLALQWVQKNIAAFG

SEQ ID NO: 12523 - protein, 27 aa, Artificial sequence
  synthetic peptide
EAPGNMGLFDQQLALQWVQKNIAAFGG

SEQ ID NO: 12524 - protein, 27 aa, Artificial sequence
  synthetic peptide
APGNMGLFDQQLALQWVQKNIAAFGGN

SEQ ID NO: 12525 - protein, 27 aa, Artificial sequence
  synthetic peptide
PGNMGLFDQQLALQWVQKNIAAFGGNP

SEQ ID NO: 12526 - protein, 27 aa, Artificial sequence
  synthetic peptide
GNMGLFDQQLALQWVQKNIAAFGGNPK

SEQ ID NO: 12527 - protein, 27 aa, Artificial sequence
  synthetic peptide
NMGLFDQQLALQWVQKNIAAFGGNPKS

SEQ ID NO: 12528 - protein, 27 aa, Artificial sequence
  synthetic peptide
MGLFDQQLALQWVQKNIAAFGGNPKSV

SEQ ID NO: 12529 - protein, 27 aa, Artificial sequence
  synthetic peptide
GLFDQQLALQWVQKNIAAFGGNPKSVT

SEQ ID NO: 12530 - protein, 27 aa, Artificial sequence
  synthetic peptide
LFDQQLALQWVQKNIAAFGGNPKSVTL

SEQ ID NO: 12531 - protein, 27 aa, Artificial sequence
  synthetic peptide
FDQQLALQWVQKNIAAFGGNPKSVTLF

SEQ ID NO: 12532 - protein, 27 aa, Artificial sequence
  synthetic peptide
DQQLALQWVQKNIAAFGGNPKSVTLFG

SEQ ID NO: 12533 - protein, 27 aa, Artificial sequence
  synthetic peptide
QQLALQWVQKNIAAFGGNPKSVTLFGE

SEQ ID NO: 12534 - protein, 27 aa, Artificial sequence
  synthetic peptide
QLALQWVQKNIAAFGGNPKSVTLFGES

SEQ ID NO: 12535 - protein, 27 aa, Artificial sequence
  synthetic peptide
LALQWVQKNIAAFGGNPKSVTLFGESA

SEQ ID NO: 12536 - protein, 27 aa, Artificial sequence
  synthetic peptide
ALQWVQKNIAAFGGNPKSVTLFGESAG

SEQ ID NO: 12537 - protein, 27 aa, Artificial sequence
  synthetic peptide
LQWVQKNIAAFGGNPKSVTLFGESAGA

SEQ ID NO: 12538 - protein, 27 aa, Artificial sequence
  synthetic peptide
QWVQKNIAAFGGNPKSVTLFGESAGAA

SEQ ID NO: 12539 - protein, 27 aa, Artificial sequence
  synthetic peptide
WVQKNIAAFGGNPKSVTLFGESAGAAS

SEQ ID NO: 12540 - protein, 27 aa, Artificial sequence
  synthetic peptide
VQKNIAAFGGNPKSVTLFGESAGAASV

SEQ ID NO: 12541 - protein, 27 aa, Artificial sequence
  synthetic peptide
QKNIAAFGGNPKSVTLFGESAGAASVS

SEQ ID NO: 12542 - protein, 27 aa, Artificial sequence
  synthetic peptide
KNIAAFGGNPKSVTLFGESAGAASVSL

SEQ ID NO: 12543 - protein, 27 aa, Artificial sequence
  synthetic peptide
NIAAFGGNPKSVTLFGESAGAASVSLH

SEQ ID NO: 12544 - protein, 27 aa, Artificial sequence
  synthetic peptide
IAAFGGNPKSVTLFGESAGAASVSLHL

SEQ ID NO: 12545 - protein, 27 aa, Artificial sequence
  synthetic peptide
AAFGGNPKSVTLFGESAGAASVSLHLL

SEQ ID NO: 12546 - protein, 27 aa, Artificial sequence
  synthetic peptide
AFGGNPKSVTLFGESAGAASVSLHLLS

SEQ ID NO: 12547 - protein, 27 aa, Artificial sequence
  synthetic peptide
FGGNPKSVTLFGESAGAASVSLHLLSP

SEQ ID NO: 12548 - protein, 27 aa, Artificial sequence
  synthetic peptide
GGNPKSVTLFGESAGAASVSLHLLSPG

SEQ ID NO: 12549 - protein, 27 aa, Artificial sequence
  synthetic peptide
GNPKSVTLFGESAGAASVSLHLLSPGS

SEQ ID NO: 12550 - protein, 27 aa, Artificial sequence
  synthetic peptide
NPKSVTLFGESAGAASVSLHLLSPGSH

SEQ ID NO: 12551 - protein, 27 aa, Artificial sequence
  synthetic peptide
PKSVTLFGESAGAASVSLHLLSPGSHS

SEQ ID NO: 12552 - protein, 27 aa, Artificial sequence
  synthetic peptide
KSVTLFGESAGAASVSLHLLSPGSHSL

SEQ ID NO: 12553 - protein, 27 aa, Artificial sequence
  synthetic peptide
SVTLFGESAGAASVSLHLLSPGSHSLF

SEQ ID NO: 12554 - protein, 27 aa, Artificial sequence
  synthetic peptide
VTLFGESAGAASVSLHLLSPGSHSLFT

SEQ ID NO: 12555 - protein, 27 aa, Artificial sequence
  synthetic peptide
TLFGESAGAASVSLHLLSPGSHSLFTR

SEQ ID NO: 12556 - protein, 27 aa, Artificial sequence
  synthetic peptide
LFGESAGAASVSLHLLSPGSHSLFTRA

SEQ ID NO: 12557 - protein, 27 aa, Artificial sequence
  synthetic peptide
FGESAGAASVSLHLLSPGSHSLFTRAI

SEQ ID NO: 12558 - protein, 27 aa, Artificial sequence
  synthetic peptide
GESAGAASVSLHLLSPGSHSLFTRAIL

SEQ ID NO: 12559 - protein, 27 aa, Artificial sequence
  synthetic peptide
ESAGAASVSLHLLSPGSHSLFTRAILQ

SEQ ID NO: 12560 - protein, 27 aa, Artificial sequence
  synthetic peptide
SAGAASVSLHLLSPGSHSLFTRAILQS

SEQ ID NO: 12561 - protein, 27 aa, Artificial sequence
  synthetic peptide
AGAASVSLHLLSPGSHSLFTRAILQSG

SEQ ID NO: 12562 - protein, 27 aa, Artificial sequence
  synthetic peptide
GAASVSLHLLSPGSHSLFTRAILQSGS

SEQ ID NO: 12563 - protein, 27 aa, Artificial sequence
  synthetic peptide
AASVSLHLLSPGSHSLFTRAILQSGSF

SEQ ID NO: 12564 - protein, 27 aa, Artificial sequence
  synthetic peptide
ASVSLHLLSPGSHSLFTRAILQSGSFN

SEQ ID NO: 12565 - protein, 27 aa, Artificial sequence
  synthetic peptide
SVSLHLLSPGSHSLFTRAILQSGSFNA

SEQ ID NO: 12566 - protein, 27 aa, Artificial sequence
  synthetic peptide
VSLHLLSPGSHSLFTRAILQSGSFNAP

SEQ ID NO: 12567 - protein, 27 aa, Artificial sequence
  synthetic peptide
SLHLLSPGSHSLFTRAILQSGSFNAPW

SEQ ID NO: 12568 - protein, 27 aa, Artificial sequence
  synthetic peptide
LHLLSPGSHSLFTRAILQSGSFNAPWA

SEQ ID NO: 12569 - protein, 27 aa, Artificial sequence
  synthetic peptide
HLLSPGSHSLFTRAILQSGSFNAPWAV

SEQ ID NO: 12570 - protein, 27 aa, Artificial sequence
  synthetic peptide
LLSPGSHSLFTRAILQSGSFNAPWAVT

SEQ ID NO: 12571 - protein, 27 aa, Artificial sequence
  synthetic peptide
LSPGSHSLFTRAILQSGSFNAPWAVTS

SEQ ID NO: 12572 - protein, 27 aa, Artificial sequence
  synthetic peptide
SPGSHSLFTRAILQSGSFNAPWAVTSL

SEQ ID NO: 12573 - protein, 27 aa, Artificial sequence
  synthetic peptide
PGSHSLFTRAILQSGSFNAPWAVTSLY

SEQ ID NO: 12574 - protein, 27 aa, Artificial sequence
  synthetic peptide
GSHSLFTRAILQSGSFNAPWAVTSLYE

SEQ ID NO: 12575 - protein, 27 aa, Artificial sequence
  synthetic peptide
SHSLFTRAILQSGSFNAPWAVTSLYEA

SEQ ID NO: 12576 - protein, 27 aa, Artificial sequence
  synthetic peptide
HSLFTRAILQSGSFNAPWAVTSLYEAR

SEQ ID NO: 12577 - protein, 27 aa, Artificial sequence
  synthetic peptide
SLFTRAILQSGSFNAPWAVTSLYEARN

SEQ ID NO: 12578 - protein, 27 aa, Artificial sequence
  synthetic peptide
LFTRAILQSGSFNAPWAVTSLYEARNR

SEQ ID NO: 12579 - protein, 27 aa, Artificial sequence
  synthetic peptide
FTRAILQSGSFNAPWAVTSLYEARNRT

SEQ ID NO: 12580 - protein, 27 aa, Artificial sequence
  synthetic peptide
TRAILQSGSFNAPWAVTSLYEARNRTL

SEQ ID NO: 12581 - protein, 27 aa, Artificial sequence
  synthetic peptide
RAILQSGSFNAPWAVTSLYEARNRTLN

SEQ ID NO: 12582 - protein, 27 aa, Artificial sequence
  synthetic peptide
AILQSGSFNAPWAVTSLYEARNRTLNL

SEQ ID NO: 12583 - protein, 27 aa, Artificial sequence
  synthetic peptide
ILQSGSFNAPWAVTSLYEARNRTLNLA

SEQ ID NO: 12584 - protein, 27 aa, Artificial sequence
  synthetic peptide
LQSGSFNAPWAVTSLYEARNRTLNLAK

SEQ ID NO: 12585 - protein, 27 aa, Artificial sequence
  synthetic peptide
QSGSFNAPWAVTSLYEARNRTLNLAKL

SEQ ID NO: 12586 - protein, 27 aa, Artificial sequence
  synthetic peptide
SGSFNAPWAVTSLYEARNRTLNLAKLT

SEQ ID NO: 12587 - protein, 27 aa, Artificial sequence
  synthetic peptide
GSFNAPWAVTSLYEARNRTLNLAKLTG

SEQ ID NO: 12588 - protein, 27 aa, Artificial sequence
  synthetic peptide
SFNAPWAVTSLYEARNRTLNLAKLTGC

SEQ ID NO: 12589 - protein, 27 aa, Artificial sequence
  synthetic peptide
FNAPWAVTSLYEARNRTLNLAKLTGCS

SEQ ID NO: 12590 - protein, 27 aa, Artificial sequence
  synthetic peptide
NAPWAVTSLYEARNRTLNLAKLTGCSR

SEQ ID NO: 12591 - protein, 27 aa, Artificial sequence
  synthetic peptide
APWAVTSLYEARNRTLNLAKLTGCSRE

SEQ ID NO: 12592 - protein, 27 aa, Artificial sequence
  synthetic peptide
PWAVTSLYEARNRTLNLAKLTGCSREN

SEQ ID NO: 12593 - protein, 27 aa, Artificial sequence
  synthetic peptide
WAVTSLYEARNRTLNLAKLTGCSRENE

SEQ ID NO: 12594 - protein, 27 aa, Artificial sequence
  synthetic peptide
AVTSLYEARNRTLNLAKLTGCSRENET

SEQ ID NO: 12595 - protein, 27 aa, Artificial sequence
  synthetic peptide
VTSLYEARNRTLNLAKLTGCSRENETE

SEQ ID NO: 12596 - protein, 27 aa, Artificial sequence
  synthetic peptide
TSLYEARNRTLNLAKLTGCSRENETEI

SEQ ID NO: 12597 - protein, 27 aa, Artificial sequence
  synthetic peptide
SLYEARNRTLNLAKLTGCSRENETEII

SEQ ID NO: 12598 - protein, 27 aa, Artificial sequence
  synthetic peptide
LYEARNRTLNLAKLTGCSRENETEIIK

SEQ ID NO: 12599 - protein, 27 aa, Artificial sequence
  synthetic peptide
YEARNRTLNLAKLTGCSRENETEIIKC

SEQ ID NO: 12600 - protein, 27 aa, Artificial sequence
  synthetic peptide
EARNRTLNLAKLTGCSRENETEIIKCL

SEQ ID NO: 12601 - protein, 27 aa, Artificial sequence
  synthetic peptide
ARNRTLNLAKLTGCSRENETEIIKCLR

SEQ ID NO: 12602 - protein, 27 aa, Artificial sequence
  synthetic peptide
RNRTLNLAKLTGCSRENETEIIKCLRN

SEQ ID NO: 12603 - protein, 27 aa, Artificial sequence
  synthetic peptide
NRTLNLAKLTGCSRENETEIIKCLRNK

SEQ ID NO: 12604 - protein, 27 aa, Artificial sequence
  synthetic peptide
RTLNLAKLTGCSRENETEIIKCLRNKD

SEQ ID NO: 12605 - protein, 27 aa, Artificial sequence
  synthetic peptide
TLNLAKLTGCSRENETEIIKCLRNKDP

SEQ ID NO: 12606 - protein, 27 aa, Artificial sequence
  synthetic peptide
LNLAKLTGCSRENETEIIKCLRNKDPQ

SEQ ID NO: 12607 - protein, 27 aa, Artificial sequence
  synthetic peptide
NLAKLTGCSRENETEIIKCLRNKDPQE

SEQ ID NO: 12608 - protein, 27 aa, Artificial sequence
  synthetic peptide
LAKLTGCSRENETEIIKCLRNKDPQEI

SEQ ID NO: 12609 - protein, 27 aa, Artificial sequence
  synthetic peptide
AKLTGCSRENETEIIKCLRNKDPQEIL

SEQ ID NO: 12610 - protein, 27 aa, Artificial sequence
  synthetic peptide
KLTGCSRENETEIIKCLRNKDPQEILL

SEQ ID NO: 12611 - protein, 27 aa, Artificial sequence
  synthetic peptide
LTGCSRENETEIIKCLRNKDPQEILLN

SEQ ID NO: 12612 - protein, 27 aa, Artificial sequence
  synthetic peptide
TGCSRENETEIIKCLRNKDPQEILLNE

SEQ ID NO: 12613 - protein, 27 aa, Artificial sequence
  synthetic peptide
GCSRENETEIIKCLRNKDPQEILLNEA

SEQ ID NO: 12614 - protein, 27 aa, Artificial sequence
  synthetic peptide
CSRENETEIIKCLRNKDPQEILLNEAF

SEQ ID NO: 12615 - protein, 27 aa, Artificial sequence
  synthetic peptide
SRENETEIIKCLRNKDPQEILLNEAFV

SEQ ID NO: 12616 - protein, 27 aa, Artificial sequence
  synthetic peptide
RENETEIIKCLRNKDPQEILLNEAFVV

SEQ ID NO: 12617 - protein, 27 aa, Artificial sequence
  synthetic peptide
ENETEIIKCLRNKDPQEILLNEAFVVP

SEQ ID NO: 12618 - protein, 27 aa, Artificial sequence
  synthetic peptide
NETEIIKCLRNKDPQEILLNEAFVVPY

SEQ ID NO: 12619 - protein, 27 aa, Artificial sequence
  synthetic peptide
ETEIIKCLRNKDPQEILLNEAFVVPYG

SEQ ID NO: 12620 - protein, 27 aa, Artificial sequence
  synthetic peptide
TEIIKCLRNKDPQEILLNEAFVVPYGT

SEQ ID NO: 12621 - protein, 27 aa, Artificial sequence
  synthetic peptide
EIIKCLRNKDPQEILLNEAFVVPYGTP

SEQ ID NO: 12622 - protein, 27 aa, Artificial sequence
  synthetic peptide
IIKCLRNKDPQEILLNEAFVVPYGTPL

SEQ ID NO: 12623 - protein, 27 aa, Artificial sequence
  synthetic peptide
IKCLRNKDPQEILLNEAFVVPYGTPLS

SEQ ID NO: 12624 - protein, 27 aa, Artificial sequence
  synthetic peptide
KCLRNKDPQEILLNEAFVVPYGTPLSV

SEQ ID NO: 12625 - protein, 27 aa, Artificial sequence
  synthetic peptide
CLRNKDPQEILLNEAFVVPYGTPLSVN

SEQ ID NO: 12626 - protein, 27 aa, Artificial sequence
  synthetic peptide
LRNKDPQEILLNEAFVVPYGTPLSVNF

SEQ ID NO: 12627 - protein, 27 aa, Artificial sequence
  synthetic peptide
RNKDPQEILLNEAFVVPYGTPLSVNFG

SEQ ID NO: 12628 - protein, 27 aa, Artificial sequence
  synthetic peptide
NKDPQEILLNEAFVVPYGTPLSVNFGP

SEQ ID NO: 12629 - protein, 27 aa, Artificial sequence
  synthetic peptide
KDPQEILLNEAFVVPYGTPLSVNFGPT

SEQ ID NO: 12630 - protein, 27 aa, Artificial sequence
  synthetic peptide
DPQEILLNEAFVVPYGTPLSVNFGPTV

SEQ ID NO: 12631 - protein, 27 aa, Artificial sequence
  synthetic peptide
PQEILLNEAFVVPYGTPLSVNFGPTVD

SEQ ID NO: 12632 - protein, 27 aa, Artificial sequence
  synthetic peptide
QEILLNEAFVVPYGTPLSVNFGPTVDG

SEQ ID NO: 12633 - protein, 27 aa, Artificial sequence
  synthetic peptide
EILLNEAFVVPYGTPLSVNFGPTVDGD

SEQ ID NO: 12634 - protein, 27 aa, Artificial sequence
  synthetic peptide
ILLNEAFVVPYGTPLSVNFGPTVDGDF

SEQ ID NO: 12635 - protein, 27 aa, Artificial sequence
  synthetic peptide
LLNEAFVVPYGTPLSVNFGPTVDGDFL

SEQ ID NO: 12636 - protein, 27 aa, Artificial sequence
  synthetic peptide
LNEAFVVPYGTPLSVNFGPTVDGDFLT

SEQ ID NO: 12637 - protein, 27 aa, Artificial sequence
  synthetic peptide
NEAFVVPYGTPLSVNFGPTVDGDFLTD

SEQ ID NO: 12638 - protein, 27 aa, Artificial sequence
  synthetic peptide
EAFVVPYGTPLSVNFGPTVDGDFLTDM

SEQ ID NO: 12639 - protein, 27 aa, Artificial sequence
  synthetic peptide
AFVVPYGTPLSVNFGPTVDGDFLTDMP

SEQ ID NO: 12640 - protein, 27 aa, Artificial sequence
  synthetic peptide
FVVPYGTPLSVNFGPTVDGDFLTDMPD

SEQ ID NO: 12641 - protein, 27 aa, Artificial sequence
  synthetic peptide
VVPYGTPLSVNFGPTVDGDFLTDMPDI

SEQ ID NO: 12642 - protein, 27 aa, Artificial sequence
  synthetic peptide
VPYGTPLSVNFGPTVDGDFLTDMPDIL

SEQ ID NO: 12643 - protein, 27 aa, Artificial sequence
  synthetic peptide
PYGTPLSVNFGPTVDGDFLTDMPDILL

SEQ ID NO: 12644 - protein, 27 aa, Artificial sequence
  synthetic peptide
YGTPLSVNFGPTVDGDFLTDMPDILLE

SEQ ID NO: 12645 - protein, 27 aa, Artificial sequence
  synthetic peptide
GTPLSVNFGPTVDGDFLTDMPDILLEL

SEQ ID NO: 12646 - protein, 27 aa, Artificial sequence
  synthetic peptide
TPLSVNFGPTVDGDFLTDMPDILLELG

SEQ ID NO: 12647 - protein, 27 aa, Artificial sequence
  synthetic peptide
PLSVNFGPTVDGDFLTDMPDILLELGQ

SEQ ID NO: 12648 - protein, 27 aa, Artificial sequence
  synthetic peptide
LSVNFGPTVDGDFLTDMPDILLELGQF

SEQ ID NO: 12649 - protein, 27 aa, Artificial sequence
  synthetic peptide
SVNFGPTVDGDFLTDMPDILLELGQFK

SEQ ID NO: 12650 - protein, 27 aa, Artificial sequence
  synthetic peptide
VNFGPTVDGDFLTDMPDILLELGQFKK

SEQ ID NO: 12651 - protein, 27 aa, Artificial sequence
  synthetic peptide
NFGPTVDGDFLTDMPDILLELGQFKKT

SEQ ID NO: 12652 - protein, 27 aa, Artificial sequence
  synthetic peptide
FGPTVDGDFLTDMPDILLELGQFKKTQ

SEQ ID NO: 12653 - protein, 27 aa, Artificial sequence
  synthetic peptide
GPTVDGDFLTDMPDILLELGQFKKTQI

SEQ ID NO: 12654 - protein, 27 aa, Artificial sequence
  synthetic peptide
PTVDGDFLTDMPDILLELGQFKKTQIL

SEQ ID NO: 12655 - protein, 27 aa, Artificial sequence
  synthetic peptide
TVDGDFLTDMPDILLELGQFKKTQILV

SEQ ID NO: 12656 - protein, 27 aa, Artificial sequence
  synthetic peptide
VDGDFLTDMPDILLELGQFKKTQILVG

SEQ ID NO: 12657 - protein, 27 aa, Artificial sequence
  synthetic peptide
DGDFLTDMPDILLELGQFKKTQILVGV

SEQ ID NO: 12658 - protein, 27 aa, Artificial sequence
  synthetic peptide
GDFLTDMPDILLELGQFKKTQILVGVN

SEQ ID NO: 12659 - protein, 27 aa, Artificial sequence
  synthetic peptide
DFLTDMPDILLELGQFKKTQILVGVNK

SEQ ID NO: 12660 - protein, 27 aa, Artificial sequence
  synthetic peptide
FLTDMPDILLELGQFKKTQILVGVNKD

SEQ ID NO: 12661 - protein, 27 aa, Artificial sequence
  synthetic peptide
LTDMPDILLELGQFKKTQILVGVNKDE

SEQ ID NO: 12662 - protein, 27 aa, Artificial sequence
  synthetic peptide
TDMPDILLELGQFKKTQILVGVNKDEG

SEQ ID NO: 12663 - protein, 27 aa, Artificial sequence
  synthetic peptide
DMPDILLELGQFKKTQILVGVNKDEGT

SEQ ID NO: 12664 - protein, 27 aa, Artificial sequence
  synthetic peptide
MPDILLELGQFKKTQILVGVNKDEGTA

SEQ ID NO: 12665 - protein, 27 aa, Artificial sequence
  synthetic peptide
PDILLELGQFKKTQILVGVNKDEGTAF

SEQ ID NO: 12666 - protein, 27 aa, Artificial sequence
  synthetic peptide
DILLELGQFKKTQILVGVNKDEGTAFL

SEQ ID NO: 12667 - protein, 27 aa, Artificial sequence
  synthetic peptide
ILLELGQFKKTQILVGVNKDEGTAFLV

SEQ ID NO: 12668 - protein, 27 aa, Artificial sequence
  synthetic peptide
LLELGQFKKTQILVGVNKDEGTAFLVY

SEQ ID NO: 12669 - protein, 27 aa, Artificial sequence
  synthetic peptide
LELGQFKKTQILVGVNKDEGTAFLVYG

SEQ ID NO: 12670 - protein, 27 aa, Artificial sequence
  synthetic peptide
ELGQFKKTQILVGVNKDEGTAFLVYGA

SEQ ID NO: 12671 - protein, 27 aa, Artificial sequence
  synthetic peptide
LGQFKKTQILVGVNKDEGTAFLVYGAP

SEQ ID NO: 12672 - protein, 27 aa, Artificial sequence
  synthetic peptide
GQFKKTQILVGVNKDEGTAFLVYGAPG

SEQ ID NO: 12673 - protein, 27 aa, Artificial sequence
  synthetic peptide
QFKKTQILVGVNKDEGTAFLVYGAPGF

SEQ ID NO: 12674 - protein, 27 aa, Artificial sequence
  synthetic peptide
FKKTQILVGVNKDEGTAFLVYGAPGFS

SEQ ID NO: 12675 - protein, 27 aa, Artificial sequence
  synthetic peptide
KKTQILVGVNKDEGTAFLVYGAPGFSK

SEQ ID NO: 12676 - protein, 27 aa, Artificial sequence
  synthetic peptide
KTQILVGVNKDEGTAFLVYGAPGFSKD

SEQ ID NO: 12677 - protein, 27 aa, Artificial sequence
  synthetic peptide
TQILVGVNKDEGTAFLVYGAPGFSKDN

SEQ ID NO: 12678 - protein, 27 aa, Artificial sequence
  synthetic peptide
QILVGVNKDEGTAFLVYGAPGFSKDNN

SEQ ID NO: 12679 - protein, 27 aa, Artificial sequence
  synthetic peptide
ILVGVNKDEGTAFLVYGAPGFSKDNNS

SEQ ID NO: 12680 - protein, 27 aa, Artificial sequence
  synthetic peptide
LVGVNKDEGTAFLVYGAPGFSKDNNSI

SEQ ID NO: 12681 - protein, 27 aa, Artificial sequence
  synthetic peptide
VGVNKDEGTAFLVYGAPGFSKDNNSII

SEQ ID NO: 12682 - protein, 27 aa, Artificial sequence
  synthetic peptide
GVNKDEGTAFLVYGAPGFSKDNNSIIT

SEQ ID NO: 12683 - protein, 27 aa, Artificial sequence
  synthetic peptide
VNKDEGTAFLVYGAPGFSKDNNSIITR

SEQ ID NO: 12684 - protein, 27 aa, Artificial sequence
  synthetic peptide
NKDEGTAFLVYGAPGFSKDNNSIITRK

SEQ ID NO: 12685 - protein, 27 aa, Artificial sequence
  synthetic peptide
KDEGTAFLVYGAPGFSKDNNSIITRKE

SEQ ID NO: 12686 - protein, 27 aa, Artificial sequence
  synthetic peptide
DEGTAFLVYGAPGFSKDNNSIITRKEF

SEQ ID NO: 12687 - protein, 27 aa, Artificial sequence
  synthetic peptide
EGTAFLVYGAPGFSKDNNSIITRKEFQ

SEQ ID NO: 12688 - protein, 27 aa, Artificial sequence
  synthetic peptide
GTAFLVYGAPGFSKDNNSIITRKEFQE

SEQ ID NO: 12689 - protein, 27 aa, Artificial sequence
  synthetic peptide
TAFLVYGAPGFSKDNNSIITRKEFQEG

SEQ ID NO: 12690 - protein, 27 aa, Artificial sequence
  synthetic peptide
AFLVYGAPGFSKDNNSIITRKEFQEGL

SEQ ID NO: 12691 - protein, 27 aa, Artificial sequence
  synthetic peptide
FLVYGAPGFSKDNNSIITRKEFQEGLK

SEQ ID NO: 12692 - protein, 27 aa, Artificial sequence
  synthetic peptide
LVYGAPGFSKDNNSIITRKEFQEGLKI

SEQ ID NO: 12693 - protein, 27 aa, Artificial sequence
  synthetic peptide
VYGAPGFSKDNNSIITRKEFQEGLKIF

SEQ ID NO: 12694 - protein, 27 aa, Artificial sequence
  synthetic peptide
YGAPGFSKDNNSIITRKEFQEGLKIFF

SEQ ID NO: 12695 - protein, 27 aa, Artificial sequence
  synthetic peptide
GAPGFSKDNNSIITRKEFQEGLKIFFP

SEQ ID NO: 12696 - protein, 27 aa, Artificial sequence
  synthetic peptide
APGFSKDNNSIITRKEFQEGLKIFFPG

SEQ ID NO: 12697 - protein, 27 aa, Artificial sequence
  synthetic peptide
PGFSKDNNSIITRKEFQEGLKIFFPGV

SEQ ID NO: 12698 - protein, 27 aa, Artificial sequence
  synthetic peptide
GFSKDNNSIITRKEFQEGLKIFFPGVS

SEQ ID NO: 12699 - protein, 27 aa, Artificial sequence
  synthetic peptide
FSKDNNSIITRKEFQEGLKIFFPGVSE

SEQ ID NO: 12700 - protein, 27 aa, Artificial sequence
  synthetic peptide
SKDNNSIITRKEFQEGLKIFFPGVSEF

SEQ ID NO: 12701 - protein, 27 aa, Artificial sequence
  synthetic peptide
KDNNSIITRKEFQEGLKIFFPGVSEFG

SEQ ID NO: 12702 - protein, 27 aa, Artificial sequence
  synthetic peptide
DNNSIITRKEFQEGLKIFFPGVSEFGK

SEQ ID NO: 12703 - protein, 27 aa, Artificial sequence
  synthetic peptide
NNSIITRKEFQEGLKIFFPGVSEFGKE

SEQ ID NO: 12704 - protein, 27 aa, Artificial sequence
  synthetic peptide
NSIITRKEFQEGLKIFFPGVSEFGKES

SEQ ID NO: 12705 - protein, 27 aa, Artificial sequence
  synthetic peptide
SIITRKEFQEGLKIFFPGVSEFGKESI

SEQ ID NO: 12706 - protein, 27 aa, Artificial sequence
  synthetic peptide
IITRKEFQEGLKIFFPGVSEFGKESIL

SEQ ID NO: 12707 - protein, 27 aa, Artificial sequence
  synthetic peptide
ITRKEFQEGLKIFFPGVSEFGKESILF

SEQ ID NO: 12708 - protein, 27 aa, Artificial sequence
  synthetic peptide
TRKEFQEGLKIFFPGVSEFGKESILFH

SEQ ID NO: 12709 - protein, 27 aa, Artificial sequence
  synthetic peptide
RKEFQEGLKIFFPGVSEFGKESILFHY

SEQ ID NO: 12710 - protein, 27 aa, Artificial sequence
  synthetic peptide
KEFQEGLKIFFPGVSEFGKESILFHYT

SEQ ID NO: 12711 - protein, 27 aa, Artificial sequence
  synthetic peptide
EFQEGLKIFFPGVSEFGKESILFHYTD

SEQ ID NO: 12712 - protein, 27 aa, Artificial sequence
  synthetic peptide
FQEGLKIFFPGVSEFGKESILFHYTDW

SEQ ID NO: 12713 - protein, 27 aa, Artificial sequence
  synthetic peptide
QEGLKIFFPGVSEFGKESILFHYTDWV

SEQ ID NO: 12714 - protein, 27 aa, Artificial sequence
  synthetic peptide
EGLKIFFPGVSEFGKESILFHYTDWVD

SEQ ID NO: 12715 - protein, 27 aa, Artificial sequence
  synthetic peptide
GLKIFFPGVSEFGKESILFHYTDWVDD

SEQ ID NO: 12716 - protein, 27 aa, Artificial sequence
  synthetic peptide
LKIFFPGVSEFGKESILFHYTDWVDDQ

SEQ ID NO: 12717 - protein, 27 aa, Artificial sequence
  synthetic peptide
KIFFPGVSEFGKESILFHYTDWVDDQR

SEQ ID NO: 12718 - protein, 27 aa, Artificial sequence
  synthetic peptide
IFFPGVSEFGKESILFHYTDWVDDQRP

SEQ ID NO: 12719 - protein, 27 aa, Artificial sequence
  synthetic peptide
FFPGVSEFGKESILFHYTDWVDDQRPE

SEQ ID NO: 12720 - protein, 27 aa, Artificial sequence
  synthetic peptide
FPGVSEFGKESILFHYTDWVDDQRPEN

SEQ ID NO: 12721 - protein, 27 aa, Artificial sequence
  synthetic peptide
PGVSEFGKESILFHYTDWVDDQRPENY

SEQ ID NO: 12722 - protein, 27 aa, Artificial sequence
  synthetic peptide
GVSEFGKESILFHYTDWVDDQRPENYR

SEQ ID NO: 12723 - protein, 27 aa, Artificial sequence
  synthetic peptide
VSEFGKESILFHYTDWVDDQRPENYRE

SEQ ID NO: 12724 - protein, 27 aa, Artificial sequence
  synthetic peptide
SEFGKESILFHYTDWVDDQRPENYREA

SEQ ID NO: 12725 - protein, 27 aa, Artificial sequence
  synthetic peptide
EFGKESILFHYTDWVDDQRPENYREAL

SEQ ID NO: 12726 - protein, 27 aa, Artificial sequence
  synthetic peptide
FGKESILFHYTDWVDDQRPENYREALG

SEQ ID NO: 12727 - protein, 27 aa, Artificial sequence
  synthetic peptide
GKESILFHYTDWVDDQRPENYREALGD

SEQ ID NO: 12728 - protein, 27 aa, Artificial sequence
  synthetic peptide
KESILFHYTDWVDDQRPENYREALGDV

SEQ ID NO: 12729 - protein, 27 aa, Artificial sequence
  synthetic peptide
ESILFHYTDWVDDQRPENYREALGDVV

SEQ ID NO: 12730 - protein, 27 aa, Artificial sequence
  synthetic peptide
SILFHYTDWVDDQRPENYREALGDVVG

SEQ ID NO: 12731 - protein, 27 aa, Artificial sequence
  synthetic peptide
ILFHYTDWVDDQRPENYREALGDVVGD

SEQ ID NO: 12732 - protein, 27 aa, Artificial sequence
  synthetic peptide
LFHYTDWVDDQRPENYREALGDVVGDY

SEQ ID NO: 12733 - protein, 27 aa, Artificial sequence
  synthetic peptide
FHYTDWVDDQRPENYREALGDVVGDYN

SEQ ID NO: 12734 - protein, 27 aa, Artificial sequence
  synthetic peptide
HYTDWVDDQRPENYREALGDVVGDYNF

SEQ ID NO: 12735 - protein, 27 aa, Artificial sequence
  synthetic peptide
YTDWVDDQRPENYREALGDVVGDYNFI

SEQ ID NO: 12736 - protein, 27 aa, Artificial sequence
  synthetic peptide
TDWVDDQRPENYREALGDVVGDYNFIC

SEQ ID NO: 12737 - protein, 27 aa, Artificial sequence
  synthetic peptide
DWVDDQRPENYREALGDVVGDYNFICP

SEQ ID NO: 12738 - protein, 27 aa, Artificial sequence
  synthetic peptide
WVDDQRPENYREALGDVVGDYNFICPA

SEQ ID NO: 12739 - protein, 27 aa, Artificial sequence
  synthetic peptide
VDDQRPENYREALGDVVGDYNFICPAL

SEQ ID NO: 12740 - protein, 27 aa, Artificial sequence
  synthetic peptide
DDQRPENYREALGDVVGDYNFICPALE

SEQ ID NO: 12741 - protein, 27 aa, Artificial sequence
  synthetic peptide
DQRPENYREALGDVVGDYNFICPALEF

SEQ ID NO: 12742 - protein, 27 aa, Artificial sequence
  synthetic peptide
QRPENYREALGDVVGDYNFICPALEFT

SEQ ID NO: 12743 - protein, 27 aa, Artificial sequence
  synthetic peptide
RPENYREALGDVVGDYNFICPALEFTK

SEQ ID NO: 12744 - protein, 27 aa, Artificial sequence
  synthetic peptide
PENYREALGDVVGDYNFICPALEFTKK

SEQ ID NO: 12745 - protein, 27 aa, Artificial sequence
  synthetic peptide
ENYREALGDVVGDYNFICPALEFTKKF

SEQ ID NO: 12746 - protein, 27 aa, Artificial sequence
  synthetic peptide
NYREALGDVVGDYNFICPALEFTKKFS

SEQ ID NO: 12747 - protein, 27 aa, Artificial sequence
  synthetic peptide
YREALGDVVGDYNFICPALEFTKKFSE

SEQ ID NO: 12748 - protein, 27 aa, Artificial sequence
  synthetic peptide
REALGDVVGDYNFICPALEFTKKFSEW

SEQ ID NO: 12749 - protein, 27 aa, Artificial sequence
  synthetic peptide
EALGDVVGDYNFICPALEFTKKFSEWG

SEQ ID NO: 12750 - protein, 27 aa, Artificial sequence
  synthetic peptide
ALGDVVGDYNFICPALEFTKKFSEWGN

SEQ ID NO: 12751 - protein, 27 aa, Artificial sequence
  synthetic peptide
LGDVVGDYNFICPALEFTKKFSEWGNN

SEQ ID NO: 12752 - protein, 27 aa, Artificial sequence
  synthetic peptide
GDVVGDYNFICPALEFTKKFSEWGNNA

SEQ ID NO: 12753 - protein, 27 aa, Artificial sequence
  synthetic peptide
DVVGDYNFICPALEFTKKFSEWGNNAF

SEQ ID NO: 12754 - protein, 27 aa, Artificial sequence
  synthetic peptide
VVGDYNFICPALEFTKKFSEWGNNAFF

SEQ ID NO: 12755 - protein, 27 aa, Artificial sequence
  synthetic peptide
VGDYNFICPALEFTKKFSEWGNNAFFY

SEQ ID NO: 12756 - protein, 27 aa, Artificial sequence
  synthetic peptide
GDYNFICPALEFTKKFSEWGNNAFFYY

SEQ ID NO: 12757 - protein, 27 aa, Artificial sequence
  synthetic peptide
DYNFICPALEFTKKFSEWGNNAFFYYF

SEQ ID NO: 12758 - protein, 27 aa, Artificial sequence
  synthetic peptide
YNFICPALEFTKKFSEWGNNAFFYYFE

SEQ ID NO: 12759 - protein, 27 aa, Artificial sequence
  synthetic peptide
NFICPALEFTKKFSEWGNNAFFYYFEH

SEQ ID NO: 12760 - protein, 27 aa, Artificial sequence
  synthetic peptide
FICPALEFTKKFSEWGNNAFFYYFEHR

SEQ ID NO: 12761 - protein, 27 aa, Artificial sequence
  synthetic peptide
ICPALEFTKKFSEWGNNAFFYYFEHRS

SEQ ID NO: 12762 - protein, 27 aa, Artificial sequence
  synthetic peptide
CPALEFTKKFSEWGNNAFFYYFEHRSS

SEQ ID NO: 12763 - protein, 27 aa, Artificial sequence
  synthetic peptide
PALEFTKKFSEWGNNAFFYYFEHRSSK

SEQ ID NO: 12764 - protein, 27 aa, Artificial sequence
  synthetic peptide
ALEFTKKFSEWGNNAFFYYFEHRSSKL

SEQ ID NO: 12765 - protein, 27 aa, Artificial sequence
  synthetic peptide
LEFTKKFSEWGNNAFFYYFEHRSSKLP

SEQ ID NO: 12766 - protein, 27 aa, Artificial sequence
  synthetic peptide
EFTKKFSEWGNNAFFYYFEHRSSKLPW

SEQ ID NO: 12767 - protein, 27 aa, Artificial sequence
  synthetic peptide
FTKKFSEWGNNAFFYYFEHRSSKLPWP

SEQ ID NO: 12768 - protein, 27 aa, Artificial sequence
  synthetic peptide
TKKFSEWGNNAFFYYFEHRSSKLPWPE

SEQ ID NO: 12769 - protein, 27 aa, Artificial sequence
  synthetic peptide
KKFSEWGNNAFFYYFEHRSSKLPWPEW

SEQ ID NO: 12770 - protein, 27 aa, Artificial sequence
  synthetic peptide
KFSEWGNNAFFYYFEHRSSKLPWPEWM

SEQ ID NO: 12771 - protein, 27 aa, Artificial sequence
  synthetic peptide
FSEWGNNAFFYYFEHRSSKLPWPEWMG

SEQ ID NO: 12772 - protein, 27 aa, Artificial sequence
  synthetic peptide
SEWGNNAFFYYFEHRSSKLPWPEWMGV

SEQ ID NO: 12773 - protein, 27 aa, Artificial sequence
  synthetic peptide
EWGNNAFFYYFEHRSSKLPWPEWMGVM

SEQ ID NO: 12774 - protein, 27 aa, Artificial sequence
  synthetic peptide
WGNNAFFYYFEHRSSKLPWPEWMGVMH

SEQ ID NO: 12775 - protein, 27 aa, Artificial sequence
  synthetic peptide
GNNAFFYYFEHRSSKLPWPEWMGVMHG

SEQ ID NO: 12776 - protein, 27 aa, Artificial sequence
  synthetic peptide
NNAFFYYFEHRSSKLPWPEWMGVMHGY

SEQ ID NO: 12777 - protein, 27 aa, Artificial sequence
  synthetic peptide
NAFFYYFEHRSSKLPWPEWMGVMHGYE

SEQ ID NO: 12778 - protein, 27 aa, Artificial sequence
  synthetic peptide
AFFYYFEHRSSKLPWPEWMGVMHGYEI

SEQ ID NO: 12779 - protein, 27 aa, Artificial sequence
  synthetic peptide
FFYYFEHRSSKLPWPEWMGVMHGYEIE

SEQ ID NO: 12780 - protein, 27 aa, Artificial sequence
  synthetic peptide
FYYFEHRSSKLPWPEWMGVMHGYEIEF

SEQ ID NO: 12781 - protein, 27 aa, Artificial sequence
  synthetic peptide
YYFEHRSSKLPWPEWMGVMHGYEIEFV

SEQ ID NO: 12782 - protein, 27 aa, Artificial sequence
  synthetic peptide
YFEHRSSKLPWPEWMGVMHGYEIEFVF

SEQ ID NO: 12783 - protein, 27 aa, Artificial sequence
  synthetic peptide
FEHRSSKLPWPEWMGVMHGYEIEFVFG

SEQ ID NO: 12784 - protein, 27 aa, Artificial sequence
  synthetic peptide
EHRSSKLPWPEWMGVMHGYEIEFVFGL

SEQ ID NO: 12785 - protein, 27 aa, Artificial sequence
  synthetic peptide
HRSSKLPWPEWMGVMHGYEIEFVFGLP

SEQ ID NO: 12786 - protein, 27 aa, Artificial sequence
  synthetic peptide
RSSKLPWPEWMGVMHGYEIEFVFGLPL

SEQ ID NO: 12787 - protein, 27 aa, Artificial sequence
  synthetic peptide
SSKLPWPEWMGVMHGYEIEFVFGLPLE

SEQ ID NO: 12788 - protein, 27 aa, Artificial sequence
  synthetic peptide
SKLPWPEWMGVMHGYEIEFVFGLPLER

SEQ ID NO: 12789 - protein, 27 aa, Artificial sequence
  synthetic peptide
KLPWPEWMGVMHGYEIEFVFGLPLERR

SEQ ID NO: 12790 - protein, 27 aa, Artificial sequence
  synthetic peptide
LPWPEWMGVMHGYEIEFVFGLPLERRD

SEQ ID NO: 12791 - protein, 27 aa, Artificial sequence
  synthetic peptide
PWPEWMGVMHGYEIEFVFGLPLERRDN

SEQ ID NO: 12792 - protein, 27 aa, Artificial sequence
  synthetic peptide
WPEWMGVMHGYEIEFVFGLPLERRDNY

SEQ ID NO: 12793 - protein, 27 aa, Artificial sequence
  synthetic peptide
PEWMGVMHGYEIEFVFGLPLERRDNYT

SEQ ID NO: 12794 - protein, 27 aa, Artificial sequence
  synthetic peptide
EWMGVMHGYEIEFVFGLPLERRDNYTK

SEQ ID NO: 12795 - protein, 27 aa, Artificial sequence
  synthetic peptide
WMGVMHGYEIEFVFGLPLERRDNYTKA

SEQ ID NO: 12796 - protein, 27 aa, Artificial sequence
  synthetic peptide
MGVMHGYEIEFVFGLPLERRDNYTKAE

SEQ ID NO: 12797 - protein, 27 aa, Artificial sequence
  synthetic peptide
GVMHGYEIEFVFGLPLERRDNYTKAEE

SEQ ID NO: 12798 - protein, 27 aa, Artificial sequence
  synthetic peptide
VMHGYEIEFVFGLPLERRDNYTKAEEI

SEQ ID NO: 12799 - protein, 27 aa, Artificial sequence
  synthetic peptide
MHGYEIEFVFGLPLERRDNYTKAEEIL

SEQ ID NO: 12800 - protein, 27 aa, Artificial sequence
  synthetic peptide
HGYEIEFVFGLPLERRDNYTKAEEILS

SEQ ID NO: 12801 - protein, 27 aa, Artificial sequence
  synthetic peptide
GYEIEFVFGLPLERRDNYTKAEEILSR

SEQ ID NO: 12802 - protein, 27 aa, Artificial sequence
  synthetic peptide
YEIEFVFGLPLERRDNYTKAEEILSRS

SEQ ID NO: 12803 - protein, 27 aa, Artificial sequence
  synthetic peptide
EIEFVFGLPLERRDNYTKAEEILSRSI

SEQ ID NO: 12804 - protein, 27 aa, Artificial sequence
  synthetic peptide
IEFVFGLPLERRDNYTKAEEILSRSIV

SEQ ID NO: 12805 - protein, 27 aa, Artificial sequence
  synthetic peptide
EFVFGLPLERRDNYTKAEEILSRSIVK

SEQ ID NO: 12806 - protein, 27 aa, Artificial sequence
  synthetic peptide
FVFGLPLERRDNYTKAEEILSRSIVKR

SEQ ID NO: 12807 - protein, 27 aa, Artificial sequence
  synthetic peptide
VFGLPLERRDNYTKAEEILSRSIVKRW

SEQ ID NO: 12808 - protein, 27 aa, Artificial sequence
  synthetic peptide
FGLPLERRDNYTKAEEILSRSIVKRWA

SEQ ID NO: 12809 - protein, 27 aa, Artificial sequence
  synthetic peptide
GLPLERRDNYTKAEEILSRSIVKRWAN

SEQ ID NO: 12810 - protein, 27 aa, Artificial sequence
  synthetic peptide
LPLERRDNYTKAEEILSRSIVKRWANF

SEQ ID NO: 12811 - protein, 27 aa, Artificial sequence
  synthetic peptide
PLERRDNYTKAEEILSRSIVKRWANFA

SEQ ID NO: 12812 - protein, 27 aa, Artificial sequence
  synthetic peptide
LERRDNYTKAEEILSRSIVKRWANFAK

SEQ ID NO: 12813 - protein, 27 aa, Artificial sequence
  synthetic peptide
ERRDNYTKAEEILSRSIVKRWANFAKY

SEQ ID NO: 12814 - protein, 27 aa, Artificial sequence
  synthetic peptide
RRDNYTKAEEILSRSIVKRWANFAKYG

SEQ ID NO: 12815 - protein, 27 aa, Artificial sequence
  synthetic peptide
RDNYTKAEEILSRSIVKRWANFAKYGN

SEQ ID NO: 12816 - protein, 27 aa, Artificial sequence
  synthetic peptide
DNYTKAEEILSRSIVKRWANFAKYGNP

SEQ ID NO: 12817 - protein, 27 aa, Artificial sequence
  synthetic peptide
NYTKAEEILSRSIVKRWANFAKYGNPN

SEQ ID NO: 12818 - protein, 27 aa, Artificial sequence
  synthetic peptide
YTKAEEILSRSIVKRWANFAKYGNPNE

SEQ ID NO: 12819 - protein, 27 aa, Artificial sequence
  synthetic peptide
TKAEEILSRSIVKRWANFAKYGNPNET

SEQ ID NO: 12820 - protein, 27 aa, Artificial sequence
  synthetic peptide
KAEEILSRSIVKRWANFAKYGNPNETQ

SEQ ID NO: 12821 - protein, 27 aa, Artificial sequence
  synthetic peptide
AEEILSRSIVKRWANFAKYGNPNETQN

SEQ ID NO: 12822 - protein, 27 aa, Artificial sequence
  synthetic peptide
EEILSRSIVKRWANFAKYGNPNETQNN

SEQ ID NO: 12823 - protein, 27 aa, Artificial sequence
  synthetic peptide
EILSRSIVKRWANFAKYGNPNETQNNS

SEQ ID NO: 12824 - protein, 27 aa, Artificial sequence
  synthetic peptide
ILSRSIVKRWANFAKYGNPNETQNNST

SEQ ID NO: 12825 - protein, 27 aa, Artificial sequence
  synthetic peptide
LSRSIVKRWANFAKYGNPNETQNNSTS

SEQ ID NO: 12826 - protein, 27 aa, Artificial sequence
  synthetic peptide
SRSIVKRWANFAKYGNPNETQNNSTSW

SEQ ID NO: 12827 - protein, 27 aa, Artificial sequence
  synthetic peptide
RSIVKRWANFAKYGNPNETQNNSTSWP

SEQ ID NO: 12828 - protein, 27 aa, Artificial sequence
  synthetic peptide
SIVKRWANFAKYGNPNETQNNSTSWPV

SEQ ID NO: 12829 - protein, 27 aa, Artificial sequence
  synthetic peptide
IVKRWANFAKYGNPNETQNNSTSWPVF

SEQ ID NO: 12830 - protein, 27 aa, Artificial sequence
  synthetic peptide
VKRWANFAKYGNPNETQNNSTSWPVFK

SEQ ID NO: 12831 - protein, 27 aa, Artificial sequence
  synthetic peptide
KRWANFAKYGNPNETQNNSTSWPVFKS

SEQ ID NO: 12832 - protein, 27 aa, Artificial sequence
  synthetic peptide
RWANFAKYGNPNETQNNSTSWPVFKST

SEQ ID NO: 12833 - protein, 27 aa, Artificial sequence
  synthetic peptide
WANFAKYGNPNETQNNSTSWPVFKSTE

SEQ ID NO: 12834 - protein, 27 aa, Artificial sequence
  synthetic peptide
ANFAKYGNPNETQNNSTSWPVFKSTEQ

SEQ ID NO: 12835 - protein, 27 aa, Artificial sequence
  synthetic peptide
NFAKYGNPNETQNNSTSWPVFKSTEQK

SEQ ID NO: 12836 - protein, 27 aa, Artificial sequence
  synthetic peptide
FAKYGNPNETQNNSTSWPVFKSTEQKY

SEQ ID NO: 12837 - protein, 27 aa, Artificial sequence
  synthetic peptide
AKYGNPNETQNNSTSWPVFKSTEQKYL

SEQ ID NO: 12838 - protein, 27 aa, Artificial sequence
  synthetic peptide
KYGNPNETQNNSTSWPVFKSTEQKYLT

SEQ ID NO: 12839 - protein, 27 aa, Artificial sequence
  synthetic peptide
YGNPNETQNNSTSWPVFKSTEQKYLTL

SEQ ID NO: 12840 - protein, 27 aa, Artificial sequence
  synthetic peptide
GNPNETQNNSTSWPVFKSTEQKYLTLN

SEQ ID NO: 12841 - protein, 27 aa, Artificial sequence
  synthetic peptide
NPNETQNNSTSWPVFKSTEQKYLTLNT

SEQ ID NO: 12842 - protein, 27 aa, Artificial sequence
  synthetic peptide
PNETQNNSTSWPVFKSTEQKYLTLNTE

SEQ ID NO: 12843 - protein, 27 aa, Artificial sequence
  synthetic peptide
NETQNNSTSWPVFKSTEQKYLTLNTES

SEQ ID NO: 12844 - protein, 27 aa, Artificial sequence
  synthetic peptide
ETQNNSTSWPVFKSTEQKYLTLNTEST

SEQ ID NO: 12845 - protein, 27 aa, Artificial sequence
  synthetic peptide
TQNNSTSWPVFKSTEQKYLTLNTESTR

SEQ ID NO: 12846 - protein, 27 aa, Artificial sequence
  synthetic peptide
QNNSTSWPVFKSTEQKYLTLNTESTRI

SEQ ID NO: 12847 - protein, 27 aa, Artificial sequence
  synthetic peptide
NNSTSWPVFKSTEQKYLTLNTESTRIM

SEQ ID NO: 12848 - protein, 27 aa, Artificial sequence
  synthetic peptide
NSTSWPVFKSTEQKYLTLNTESTRIMT

SEQ ID NO: 12849 - protein, 27 aa, Artificial sequence
  synthetic peptide
STSWPVFKSTEQKYLTLNTESTRIMTK

SEQ ID NO: 12850 - protein, 27 aa, Artificial sequence
  synthetic peptide
TSWPVFKSTEQKYLTLNTESTRIMTKL

SEQ ID NO: 12851 - protein, 27 aa, Artificial sequence
  synthetic peptide
SWPVFKSTEQKYLTLNTESTRIMTKLR

SEQ ID NO: 12852 - protein, 27 aa, Artificial sequence
  synthetic peptide
WPVFKSTEQKYLTLNTESTRIMTKLRA

SEQ ID NO: 12853 - protein, 27 aa, Artificial sequence
  synthetic peptide
PVFKSTEQKYLTLNTESTRIMTKLRAQ

SEQ ID NO: 12854 - protein, 27 aa, Artificial sequence
  synthetic peptide
VFKSTEQKYLTLNTESTRIMTKLRAQQ

SEQ ID NO: 12855 - protein, 27 aa, Artificial sequence
  synthetic peptide
FKSTEQKYLTLNTESTRIMTKLRAQQC

SEQ ID NO: 12856 - protein, 27 aa, Artificial sequence
  synthetic peptide
KSTEQKYLTLNTESTRIMTKLRAQQCR

SEQ ID NO: 12857 - protein, 27 aa, Artificial sequence
  synthetic peptide
STEQKYLTLNTESTRIMTKLRAQQCRF

SEQ ID NO: 12858 - protein, 27 aa, Artificial sequence
  synthetic peptide
TEQKYLTLNTESTRIMTKLRAQQCRFW

SEQ ID NO: 12859 - protein, 27 aa, Artificial sequence
  synthetic peptide
EQKYLTLNTESTRIMTKLRAQQCRFWT

SEQ ID NO: 12860 - protein, 27 aa, Artificial sequence
  synthetic peptide
QKYLTLNTESTRIMTKLRAQQCRFWTS

SEQ ID NO: 12861 - protein, 27 aa, Artificial sequence
  synthetic peptide
KYLTLNTESTRIMTKLRAQQCRFWTSF

SEQ ID NO: 12862 - protein, 27 aa, Artificial sequence
  synthetic peptide
YLTLNTESTRIMTKLRAQQCRFWTSFF

SEQ ID NO: 12863 - protein, 27 aa, Artificial sequence
  synthetic peptide
LTLNTESTRIMTKLRAQQCRFWTSFFP

SEQ ID NO: 12864 - protein, 27 aa, Artificial sequence
  synthetic peptide
TLNTESTRIMTKLRAQQCRFWTSFFPK

SEQ ID NO: 12865 - protein, 27 aa, Artificial sequence
  synthetic peptide
LNTESTRIMTKLRAQQCRFWTSFFPKV

SEQ ID NO: 12866 - protein, 27 aa, Artificial sequence
  synthetic peptide
NTESTRIMTKLRAQQCRFWTSFFPKVL

SEQ ID NO: 12867 - protein, 27 aa, Artificial sequence
  synthetic peptide
TESTRIMTKLRAQQCRFWTSFFPKVLE

SEQ ID NO: 12868 - protein, 27 aa, Artificial sequence
  synthetic peptide
ESTRIMTKLRAQQCRFWTSFFPKVLEM

SEQ ID NO: 12869 - protein, 27 aa, Artificial sequence
  synthetic peptide
STRIMTKLRAQQCRFWTSFFPKVLEMT

SEQ ID NO: 12870 - protein, 27 aa, Artificial sequence
  synthetic peptide
TRIMTKLRAQQCRFWTSFFPKVLEMTG

SEQ ID NO: 12871 - protein, 27 aa, Artificial sequence
  synthetic peptide
RIMTKLRAQQCRFWTSFFPKVLEMTGN

SEQ ID NO: 12872 - protein, 27 aa, Artificial sequence
  synthetic peptide
IMTKLRAQQCRFWTSFFPKVLEMTGNI

SEQ ID NO: 12873 - protein, 27 aa, Artificial sequence
  synthetic peptide
MTKLRAQQCRFWTSFFPKVLEMTGNID

SEQ ID NO: 12874 - protein, 27 aa, Artificial sequence
  synthetic peptide
TKLRAQQCRFWTSFFPKVLEMTGNIDE

SEQ ID NO: 12875 - protein, 27 aa, Artificial sequence
  synthetic peptide
KLRAQQCRFWTSFFPKVLEMTGNIDEA

SEQ ID NO: 12876 - protein, 27 aa, Artificial sequence
  synthetic peptide
LRAQQCRFWTSFFPKVLEMTGNIDEAE

SEQ ID NO: 12877 - protein, 27 aa, Artificial sequence
  synthetic peptide
RAQQCRFWTSFFPKVLEMTGNIDEAEW

SEQ ID NO: 12878 - protein, 27 aa, Artificial sequence
  synthetic peptide
AQQCRFWTSFFPKVLEMTGNIDEAEWE

SEQ ID NO: 12879 - protein, 27 aa, Artificial sequence
  synthetic peptide
QQCRFWTSFFPKVLEMTGNIDEAEWEW

SEQ ID NO: 12880 - protein, 27 aa, Artificial sequence
  synthetic peptide
QCRFWTSFFPKVLEMTGNIDEAEWEWK

SEQ ID NO: 12881 - protein, 27 aa, Artificial sequence
  synthetic peptide
CRFWTSFFPKVLEMTGNIDEAEWEWKA

SEQ ID NO: 12882 - protein, 27 aa, Artificial sequence
  synthetic peptide
RFWTSFFPKVLEMTGNIDEAEWEWKAG

SEQ ID NO: 12883 - protein, 27 aa, Artificial sequence
  synthetic peptide
FWTSFFPKVLEMTGNIDEAEWEWKAGF

SEQ ID NO: 12884 - protein, 27 aa, Artificial sequence
  synthetic peptide
WTSFFPKVLEMTGNIDEAEWEWKAGFH

SEQ ID NO: 12885 - protein, 27 aa, Artificial sequence
  synthetic peptide
TSFFPKVLEMTGNIDEAEWEWKAGFHR

SEQ ID NO: 12886 - protein, 27 aa, Artificial sequence
  synthetic peptide
SFFPKVLEMTGNIDEAEWEWKAGFHRW

SEQ ID NO: 12887 - protein, 27 aa, Artificial sequence
  synthetic peptide
FFPKVLEMTGNIDEAEWEWKAGFHRWN

SEQ ID NO: 12888 - protein, 27 aa, Artificial sequence
  synthetic peptide
FPKVLEMTGNIDEAEWEWKAGFHRWNN

SEQ ID NO: 12889 - protein, 27 aa, Artificial sequence
  synthetic peptide
PKVLEMTGNIDEAEWEWKAGFHRWNNY

SEQ ID NO: 12890 - protein, 27 aa, Artificial sequence
  synthetic peptide
KVLEMTGNIDEAEWEWKAGFHRWNNYM

SEQ ID NO: 12891 - protein, 27 aa, Artificial sequence
  synthetic peptide
VLEMTGNIDEAEWEWKAGFHRWNNYMM

SEQ ID NO: 12892 - protein, 27 aa, Artificial sequence
  synthetic peptide
LEMTGNIDEAEWEWKAGFHRWNNYMMD

SEQ ID NO: 12893 - protein, 27 aa, Artificial sequence
  synthetic peptide
EMTGNIDEAEWEWKAGFHRWNNYMMDW

SEQ ID NO: 12894 - protein, 27 aa, Artificial sequence
  synthetic peptide
MTGNIDEAEWEWKAGFHRWNNYMMDWK

SEQ ID NO: 12895 - protein, 27 aa, Artificial sequence
  synthetic peptide
TGNIDEAEWEWKAGFHRWNNYMMDWKN

SEQ ID NO: 12896 - protein, 27 aa, Artificial sequence
  synthetic peptide
GNIDEAEWEWKAGFHRWNNYMMDWKNQ

SEQ ID NO: 12897 - protein, 27 aa, Artificial sequence
  synthetic peptide
NIDEAEWEWKAGFHRWNNYMMDWKNQF

SEQ ID NO: 12898 - protein, 27 aa, Artificial sequence
  synthetic peptide
IDEAEWEWKAGFHRWNNYMMDWKNQFN

SEQ ID NO: 12899 - protein, 27 aa, Artificial sequence
  synthetic peptide
DEAEWEWKAGFHRWNNYMMDWKNQFND

SEQ ID NO: 12900 - protein, 27 aa, Artificial sequence
  synthetic peptide
EAEWEWKAGFHRWNNYMMDWKNQFNDY

SEQ ID NO: 12901 - protein, 27 aa, Artificial sequence
  synthetic peptide
AEWEWKAGFHRWNNYMMDWKNQFNDYT

SEQ ID NO: 12902 - protein, 27 aa, Artificial sequence
  synthetic peptide
EWEWKAGFHRWNNYMMDWKNQFNDYTS

SEQ ID NO: 12903 - protein, 27 aa, Artificial sequence
  synthetic peptide
WEWKAGFHRWNNYMMDWKNQFNDYTSK

SEQ ID NO: 12904 - protein, 27 aa, Artificial sequence
  synthetic peptide
EWKAGFHRWNNYMMDWKNQFNDYTSKK

SEQ ID NO: 12905 - protein, 27 aa, Artificial sequence
  synthetic peptide
WKAGFHRWNNYMMDWKNQFNDYTSKKE

SEQ ID NO: 12906 - protein, 27 aa, Artificial sequence
  synthetic peptide
KAGFHRWNNYMMDWKNQFNDYTSKKES

SEQ ID NO: 12907 - protein, 27 aa, Artificial sequence
  synthetic peptide
AGFHRWNNYMMDWKNQFNDYTSKKESC

SEQ ID NO: 12908 - protein, 27 aa, Artificial sequence
  synthetic peptide
GFHRWNNYMMDWKNQFNDYTSKKESCV

SEQ ID NO: 12909 - protein, 27 aa, Artificial sequence
  synthetic peptide
FHRWNNYMMDWKNQFNDYTSKKESCVG

SEQ ID NO: 12910 - protein, 27 aa, Artificial sequence
  synthetic peptide
HRWNNYMMDWKNQFNDYTSKKESCVGL

SEQ ID NO: 12911 - protein, 28 aa, Artificial sequence
  synthetic peptide
MHSKVTIICIRFLFWFLLLCMLIGKSHT

SEQ ID NO: 12912 - protein, 28 aa, Artificial sequence
  synthetic peptide
HSKVTIICIRFLFWFLLLCMLIGKSHTE

SEQ ID NO: 12913 - protein, 28 aa, Artificial sequence
  synthetic peptide
SKVTIICIRFLFWFLLLCMLIGKSHTED

SEQ ID NO: 12914 - protein, 28 aa, Artificial sequence
  synthetic peptide
KVTIICIRFLFWFLLLCMLIGKSHTEDD

SEQ ID NO: 12915 - protein, 28 aa, Artificial sequence
  synthetic peptide
VTIICIRFLFWFLLLCMLIGKSHTEDDI

SEQ ID NO: 12916 - protein, 28 aa, Artificial sequence
  synthetic peptide
TIICIRFLFWFLLLCMLIGKSHTEDDII

SEQ ID NO: 12917 - protein, 28 aa, Artificial sequence
  synthetic peptide
IICIRFLFWFLLLCMLIGKSHTEDDIII

SEQ ID NO: 12918 - protein, 28 aa, Artificial sequence
  synthetic peptide
ICIRFLFWFLLLCMLIGKSHTEDDIIIA

SEQ ID NO: 12919 - protein, 28 aa, Artificial sequence
  synthetic peptide
CIRFLFWFLLLCMLIGKSHTEDDIIIAT

SEQ ID NO: 12920 - protein, 28 aa, Artificial sequence
  synthetic peptide
IRFLFWFLLLCMLIGKSHTEDDIIIATK

SEQ ID NO: 12921 - protein, 28 aa, Artificial sequence
  synthetic peptide
RFLFWFLLLCMLIGKSHTEDDIIIATKN

SEQ ID NO: 12922 - protein, 28 aa, Artificial sequence
  synthetic peptide
FLFWFLLLCMLIGKSHTEDDIIIATKNG

SEQ ID NO: 12923 - protein, 28 aa, Artificial sequence
  synthetic peptide
LFWFLLLCMLIGKSHTEDDIIIATKNGK

SEQ ID NO: 12924 - protein, 28 aa, Artificial sequence
  synthetic peptide
FWFLLLCMLIGKSHTEDDIIIATKNGKV

SEQ ID NO: 12925 - protein, 28 aa, Artificial sequence
  synthetic peptide
WFLLLCMLIGKSHTEDDIIIATKNGKVR

SEQ ID NO: 12926 - protein, 28 aa, Artificial sequence
  synthetic peptide
FLLLCMLIGKSHTEDDIIIATKNGKVRG

SEQ ID NO: 12927 - protein, 28 aa, Artificial sequence
  synthetic peptide
LLLCMLIGKSHTEDDIIIATKNGKVRGM

SEQ ID NO: 12928 - protein, 28 aa, Artificial sequence
  synthetic peptide
LLCMLIGKSHTEDDIIIATKNGKVRGMN

SEQ ID NO: 12929 - protein, 28 aa, Artificial sequence
  synthetic peptide
LCMLIGKSHTEDDIIIATKNGKVRGMNL

SEQ ID NO: 12930 - protein, 28 aa, Artificial sequence
  synthetic peptide
CMLIGKSHTEDDIIIATKNGKVRGMNLT

SEQ ID NO: 12931 - protein, 28 aa, Artificial sequence
  synthetic peptide
MLIGKSHTEDDIIIATKNGKVRGMNLTV

SEQ ID NO: 12932 - protein, 28 aa, Artificial sequence
  synthetic peptide
LIGKSHTEDDIIIATKNGKVRGMNLTVF

SEQ ID NO: 12933 - protein, 28 aa, Artificial sequence
  synthetic peptide
IGKSHTEDDIIIATKNGKVRGMNLTVFG

SEQ ID NO: 12934 - protein, 28 aa, Artificial sequence
  synthetic peptide
GKSHTEDDIIIATKNGKVRGMNLTVFGG

SEQ ID NO: 12935 - protein, 28 aa, Artificial sequence
  synthetic peptide
KSHTEDDIIIATKNGKVRGMNLTVFGGT

SEQ ID NO: 12936 - protein, 28 aa, Artificial sequence
  synthetic peptide
SHTEDDIIIATKNGKVRGMNLTVFGGTV

SEQ ID NO: 12937 - protein, 28 aa, Artificial sequence
  synthetic peptide
HTEDDIIIATKNGKVRGMNLTVFGGTVT

SEQ ID NO: 12938 - protein, 28 aa, Artificial sequence
  synthetic peptide
TEDDIIIATKNGKVRGMNLTVFGGTVTA

SEQ ID NO: 12939 - protein, 28 aa, Artificial sequence
  synthetic peptide
EDDIIIATKNGKVRGMNLTVFGGTVTAF

SEQ ID NO: 12940 - protein, 28 aa, Artificial sequence
  synthetic peptide
DDIIIATKNGKVRGMNLTVFGGTVTAFL

SEQ ID NO: 12941 - protein, 28 aa, Artificial sequence
  synthetic peptide
DIIIATKNGKVRGMNLTVFGGTVTAFLG

SEQ ID NO: 12942 - protein, 28 aa, Artificial sequence
  synthetic peptide
IIIATKNGKVRGMNLTVFGGTVTAFLGI

SEQ ID NO: 12943 - protein, 28 aa, Artificial sequence
  synthetic peptide
IIATKNGKVRGMNLTVFGGTVTAFLGIP

SEQ ID NO: 12944 - protein, 28 aa, Artificial sequence
  synthetic peptide
IATKNGKVRGMNLTVFGGTVTAFLGIPY

SEQ ID NO: 12945 - protein, 28 aa, Artificial sequence
  synthetic peptide
ATKNGKVRGMNLTVFGGTVTAFLGIPYA

SEQ ID NO: 12946 - protein, 28 aa, Artificial sequence
  synthetic peptide
TKNGKVRGMNLTVFGGTVTAFLGIPYAQ

SEQ ID NO: 12947 - protein, 28 aa, Artificial sequence
  synthetic peptide
KNGKVRGMNLTVFGGTVTAFLGIPYAQP

SEQ ID NO: 12948 - protein, 28 aa, Artificial sequence
  synthetic peptide
NGKVRGMNLTVFGGTVTAFLGIPYAQPP

SEQ ID NO: 12949 - protein, 28 aa, Artificial sequence
  synthetic peptide
GKVRGMNLTVFGGTVTAFLGIPYAQPPL

SEQ ID NO: 12950 - protein, 28 aa, Artificial sequence
  synthetic peptide
KVRGMNLTVFGGTVTAFLGIPYAQPPLG

SEQ ID NO: 12951 - protein, 28 aa, Artificial sequence
  synthetic peptide
VRGMNLTVFGGTVTAFLGIPYAQPPLGR

SEQ ID NO: 12952 - protein, 28 aa, Artificial sequence
  synthetic peptide
RGMNLTVFGGTVTAFLGIPYAQPPLGRL

SEQ ID NO: 12953 - protein, 28 aa, Artificial sequence
  synthetic peptide
GMNLTVFGGTVTAFLGIPYAQPPLGRLR

SEQ ID NO: 12954 - protein, 28 aa, Artificial sequence
  synthetic peptide
MNLTVFGGTVTAFLGIPYAQPPLGRLRF

SEQ ID NO: 12955 - protein, 28 aa, Artificial sequence
  synthetic peptide
NLTVFGGTVTAFLGIPYAQPPLGRLRFK

SEQ ID NO: 12956 - protein, 28 aa, Artificial sequence
  synthetic peptide
LTVFGGTVTAFLGIPYAQPPLGRLRFKK

SEQ ID NO: 12957 - protein, 28 aa, Artificial sequence
  synthetic peptide
TVFGGTVTAFLGIPYAQPPLGRLRFKKP

SEQ ID NO: 12958 - protein, 28 aa, Artificial sequence
  synthetic peptide
VFGGTVTAFLGIPYAQPPLGRLRFKKPQ

SEQ ID NO: 12959 - protein, 28 aa, Artificial sequence
  synthetic peptide
FGGTVTAFLGIPYAQPPLGRLRFKKPQS

SEQ ID NO: 12960 - protein, 28 aa, Artificial sequence
  synthetic peptide
GGTVTAFLGIPYAQPPLGRLRFKKPQSL

SEQ ID NO: 12961 - protein, 28 aa, Artificial sequence
  synthetic peptide
GTVTAFLGIPYAQPPLGRLRFKKPQSLT

SEQ ID NO: 12962 - protein, 28 aa, Artificial sequence
  synthetic peptide
TVTAFLGIPYAQPPLGRLRFKKPQSLTK

SEQ ID NO: 12963 - protein, 28 aa, Artificial sequence
  synthetic peptide
VTAFLGIPYAQPPLGRLRFKKPQSLTKW

SEQ ID NO: 12964 - protein, 28 aa, Artificial sequence
  synthetic peptide
TAFLGIPYAQPPLGRLRFKKPQSLTKWS

SEQ ID NO: 12965 - protein, 28 aa, Artificial sequence
  synthetic peptide
AFLGIPYAQPPLGRLRFKKPQSLTKWSD

SEQ ID NO: 12966 - protein, 28 aa, Artificial sequence
  synthetic peptide
FLGIPYAQPPLGRLRFKKPQSLTKWSDI

SEQ ID NO: 12967 - protein, 28 aa, Artificial sequence
  synthetic peptide
LGIPYAQPPLGRLRFKKPQSLTKWSDIW

SEQ ID NO: 12968 - protein, 28 aa, Artificial sequence
  synthetic peptide
GIPYAQPPLGRLRFKKPQSLTKWSDIWN

SEQ ID NO: 12969 - protein, 28 aa, Artificial sequence
  synthetic peptide
IPYAQPPLGRLRFKKPQSLTKWSDIWNA

SEQ ID NO: 12970 - protein, 28 aa, Artificial sequence
  synthetic peptide
PYAQPPLGRLRFKKPQSLTKWSDIWNAT

SEQ ID NO: 12971 - protein, 28 aa, Artificial sequence
  synthetic peptide
YAQPPLGRLRFKKPQSLTKWSDIWNATK

SEQ ID NO: 12972 - protein, 28 aa, Artificial sequence
  synthetic peptide
AQPPLGRLRFKKPQSLTKWSDIWNATKY

SEQ ID NO: 12973 - protein, 28 aa, Artificial sequence
  synthetic peptide
QPPLGRLRFKKPQSLTKWSDIWNATKYA

SEQ ID NO: 12974 - protein, 28 aa, Artificial sequence
  synthetic peptide
PPLGRLRFKKPQSLTKWSDIWNATKYAN

SEQ ID NO: 12975 - protein, 28 aa, Artificial sequence
  synthetic peptide
PLGRLRFKKPQSLTKWSDIWNATKYANS

SEQ ID NO: 12976 - protein, 28 aa, Artificial sequence
  synthetic peptide
LGRLRFKKPQSLTKWSDIWNATKYANSC

SEQ ID NO: 12977 - protein, 28 aa, Artificial sequence
  synthetic peptide
GRLRFKKPQSLTKWSDIWNATKYANSCC

SEQ ID NO: 12978 - protein, 28 aa, Artificial sequence
  synthetic peptide
RLRFKKPQSLTKWSDIWNATKYANSCCQ

SEQ ID NO: 12979 - protein, 28 aa, Artificial sequence
  synthetic peptide
LRFKKPQSLTKWSDIWNATKYANSCCQN

SEQ ID NO: 12980 - protein, 28 aa, Artificial sequence
  synthetic peptide
RFKKPQSLTKWSDIWNATKYANSCCQNI

SEQ ID NO: 12981 - protein, 28 aa, Artificial sequence
  synthetic peptide
FKKPQSLTKWSDIWNATKYANSCCQNID

SEQ ID NO: 12982 - protein, 28 aa, Artificial sequence
  synthetic peptide
KKPQSLTKWSDIWNATKYANSCCQNIDQ

SEQ ID NO: 12983 - protein, 28 aa, Artificial sequence
  synthetic peptide
KPQSLTKWSDIWNATKYANSCCQNIDQS

SEQ ID NO: 12984 - protein, 28 aa, Artificial sequence
  synthetic peptide
PQSLTKWSDIWNATKYANSCCQNIDQSF

SEQ ID NO: 12985 - protein, 28 aa, Artificial sequence
  synthetic peptide
QSLTKWSDIWNATKYANSCCQNIDQSFP

SEQ ID NO: 12986 - protein, 28 aa, Artificial sequence
  synthetic peptide
SLTKWSDIWNATKYANSCCQNIDQSFPG

SEQ ID NO: 12987 - protein, 28 aa, Artificial sequence
  synthetic peptide
LTKWSDIWNATKYANSCCQNIDQSFPGF

SEQ ID NO: 12988 - protein, 28 aa, Artificial sequence
  synthetic peptide
TKWSDIWNATKYANSCCQNIDQSFPGFH

SEQ ID NO: 12989 - protein, 28 aa, Artificial sequence
  synthetic peptide
KWSDIWNATKYANSCCQNIDQSFPGFHG

SEQ ID NO: 12990 - protein, 28 aa, Artificial sequence
  synthetic peptide
WSDIWNATKYANSCCQNIDQSFPGFHGS

SEQ ID NO: 12991 - protein, 28 aa, Artificial sequence
  synthetic peptide
SDIWNATKYANSCCQNIDQSFPGFHGSE

SEQ ID NO: 12992 - protein, 28 aa, Artificial sequence
  synthetic peptide
DIWNATKYANSCCQNIDQSFPGFHGSEM

SEQ ID NO: 12993 - protein, 28 aa, Artificial sequence
  synthetic peptide
IWNATKYANSCCQNIDQSFPGFHGSEMW

SEQ ID NO: 12994 - protein, 28 aa, Artificial sequence
  synthetic peptide
WNATKYANSCCQNIDQSFPGFHGSEMWN

SEQ ID NO: 12995 - protein, 28 aa, Artificial sequence
  synthetic peptide
NATKYANSCCQNIDQSFPGFHGSEMWNP

SEQ ID NO: 12996 - protein, 28 aa, Artificial sequence
  synthetic peptide
ATKYANSCCQNIDQSFPGFHGSEMWNPN

SEQ ID NO: 12997 - protein, 28 aa, Artificial sequence
  synthetic peptide
TKYANSCCQNIDQSFPGFHGSEMWNPNT

SEQ ID NO: 12998 - protein, 28 aa, Artificial sequence
  synthetic peptide
KYANSCCQNIDQSFPGFHGSEMWNPNTD

SEQ ID NO: 12999 - protein, 28 aa, Artificial sequence
  synthetic peptide
YANSCCQNIDQSFPGFHGSEMWNPNTDL

SEQ ID NO: 13000 - protein, 28 aa, Artificial sequence
  synthetic peptide
ANSCCQNIDQSFPGFHGSEMWNPNTDLS

SEQ ID NO: 13001 - protein, 28 aa, Artificial sequence
  synthetic peptide
NSCCQNIDQSFPGFHGSEMWNPNTDLSE

SEQ ID NO: 13002 - protein, 28 aa, Artificial sequence
  synthetic peptide
SCCQNIDQSFPGFHGSEMWNPNTDLSED

SEQ ID NO: 13003 - protein, 28 aa, Artificial sequence
  synthetic peptide
CCQNIDQSFPGFHGSEMWNPNTDLSEDC

SEQ ID NO: 13004 - protein, 28 aa, Artificial sequence
  synthetic peptide
CQNIDQSFPGFHGSEMWNPNTDLSEDCL

SEQ ID NO: 13005 - protein, 28 aa, Artificial sequence
  synthetic peptide
QNIDQSFPGFHGSEMWNPNTDLSEDCLY

SEQ ID NO: 13006 - protein, 28 aa, Artificial sequence
  synthetic peptide
NIDQSFPGFHGSEMWNPNTDLSEDCLYL

SEQ ID NO: 13007 - protein, 28 aa, Artificial sequence
  synthetic peptide
IDQSFPGFHGSEMWNPNTDLSEDCLYLN

SEQ ID NO: 13008 - protein, 28 aa, Artificial sequence
  synthetic peptide
DQSFPGFHGSEMWNPNTDLSEDCLYLNV

SEQ ID NO: 13009 - protein, 28 aa, Artificial sequence
  synthetic peptide
QSFPGFHGSEMWNPNTDLSEDCLYLNVW

SEQ ID NO: 13010 - protein, 28 aa, Artificial sequence
  synthetic peptide
SFPGFHGSEMWNPNTDLSEDCLYLNVWI

SEQ ID NO: 13011 - protein, 28 aa, Artificial sequence
  synthetic peptide
FPGFHGSEMWNPNTDLSEDCLYLNVWIP

SEQ ID NO: 13012 - protein, 28 aa, Artificial sequence
  synthetic peptide
PGFHGSEMWNPNTDLSEDCLYLNVWIPA

SEQ ID NO: 13013 - protein, 28 aa, Artificial sequence
  synthetic peptide
GFHGSEMWNPNTDLSEDCLYLNVWIPAP

SEQ ID NO: 13014 - protein, 28 aa, Artificial sequence
  synthetic peptide
FHGSEMWNPNTDLSEDCLYLNVWIPAPK

SEQ ID NO: 13015 - protein, 28 aa, Artificial sequence
  synthetic peptide
HGSEMWNPNTDLSEDCLYLNVWIPAPKP

SEQ ID NO: 13016 - protein, 28 aa, Artificial sequence
  synthetic peptide
GSEMWNPNTDLSEDCLYLNVWIPAPKPK

SEQ ID NO: 13017 - protein, 28 aa, Artificial sequence
  synthetic peptide
SEMWNPNTDLSEDCLYLNVWIPAPKPKN

SEQ ID NO: 13018 - protein, 28 aa, Artificial sequence
  synthetic peptide
EMWNPNTDLSEDCLYLNVWIPAPKPKNA

SEQ ID NO: 13019 - protein, 28 aa, Artificial sequence
  synthetic peptide
MWNPNTDLSEDCLYLNVWIPAPKPKNAT

SEQ ID NO: 13020 - protein, 28 aa, Artificial sequence
  synthetic peptide
WNPNTDLSEDCLYLNVWIPAPKPKNATV

SEQ ID NO: 13021 - protein, 28 aa, Artificial sequence
  synthetic peptide
NPNTDLSEDCLYLNVWIPAPKPKNATVL

SEQ ID NO: 13022 - protein, 28 aa, Artificial sequence
  synthetic peptide
PNTDLSEDCLYLNVWIPAPKPKNATVLI

SEQ ID NO: 13023 - protein, 28 aa, Artificial sequence
  synthetic peptide
NTDLSEDCLYLNVWIPAPKPKNATVLIW

SEQ ID NO: 13024 - protein, 28 aa, Artificial sequence
  synthetic peptide
TDLSEDCLYLNVWIPAPKPKNATVLIWI

SEQ ID NO: 13025 - protein, 28 aa, Artificial sequence
  synthetic peptide
DLSEDCLYLNVWIPAPKPKNATVLIWIY

SEQ ID NO: 13026 - protein, 28 aa, Artificial sequence
  synthetic peptide
LSEDCLYLNVWIPAPKPKNATVLIWIYG

SEQ ID NO: 13027 - protein, 28 aa, Artificial sequence
  synthetic peptide
SEDCLYLNVWIPAPKPKNATVLIWIYGG

SEQ ID NO: 13028 - protein, 28 aa, Artificial sequence
  synthetic peptide
EDCLYLNVWIPAPKPKNATVLIWIYGGG

SEQ ID NO: 13029 - protein, 28 aa, Artificial sequence
  synthetic peptide
DCLYLNVWIPAPKPKNATVLIWIYGGGF

SEQ ID NO: 13030 - protein, 28 aa, Artificial sequence
  synthetic peptide
CLYLNVWIPAPKPKNATVLIWIYGGGFQ

SEQ ID NO: 13031 - protein, 28 aa, Artificial sequence
  synthetic peptide
LYLNVWIPAPKPKNATVLIWIYGGGFQT

SEQ ID NO: 13032 - protein, 28 aa, Artificial sequence
  synthetic peptide
YLNVWIPAPKPKNATVLIWIYGGGFQTG

SEQ ID NO: 13033 - protein, 28 aa, Artificial sequence
  synthetic peptide
LNVWIPAPKPKNATVLIWIYGGGFQTGT

SEQ ID NO: 13034 - protein, 28 aa, Artificial sequence
  synthetic peptide
NVWIPAPKPKNATVLIWIYGGGFQTGTS

SEQ ID NO: 13035 - protein, 28 aa, Artificial sequence
  synthetic peptide
VWIPAPKPKNATVLIWIYGGGFQTGTSS

SEQ ID NO: 13036 - protein, 28 aa, Artificial sequence
  synthetic peptide
WIPAPKPKNATVLIWIYGGGFQTGTSSL

SEQ ID NO: 13037 - protein, 28 aa, Artificial sequence
  synthetic peptide
IPAPKPKNATVLIWIYGGGFQTGTSSLH

SEQ ID NO: 13038 - protein, 28 aa, Artificial sequence
  synthetic peptide
PAPKPKNATVLIWIYGGGFQTGTSSLHV

SEQ ID NO: 13039 - protein, 28 aa, Artificial sequence
  synthetic peptide
APKPKNATVLIWIYGGGFQTGTSSLHVY

SEQ ID NO: 13040 - protein, 28 aa, Artificial sequence
  synthetic peptide
PKPKNATVLIWIYGGGFQTGTSSLHVYD

SEQ ID NO: 13041 - protein, 28 aa, Artificial sequence
  synthetic peptide
KPKNATVLIWIYGGGFQTGTSSLHVYDG

SEQ ID NO: 13042 - protein, 28 aa, Artificial sequence
  synthetic peptide
PKNATVLIWIYGGGFQTGTSSLHVYDGK

SEQ ID NO: 13043 - protein, 28 aa, Artificial sequence
  synthetic peptide
KNATVLIWIYGGGFQTGTSSLHVYDGKF

SEQ ID NO: 13044 - protein, 28 aa, Artificial sequence
  synthetic peptide
NATVLIWIYGGGFQTGTSSLHVYDGKFL

SEQ ID NO: 13045 - protein, 28 aa, Artificial sequence
  synthetic peptide
ATVLIWIYGGGFQTGTSSLHVYDGKFLA

SEQ ID NO: 13046 - protein, 28 aa, Artificial sequence
  synthetic peptide
TVLIWIYGGGFQTGTSSLHVYDGKFLAR

SEQ ID NO: 13047 - protein, 28 aa, Artificial sequence
  synthetic peptide
VLIWIYGGGFQTGTSSLHVYDGKFLARV

SEQ ID NO: 13048 - protein, 28 aa, Artificial sequence
  synthetic peptide
LIWIYGGGFQTGTSSLHVYDGKFLARVE

SEQ ID NO: 13049 - protein, 28 aa, Artificial sequence
  synthetic peptide
IWIYGGGFQTGTSSLHVYDGKFLARVER

SEQ ID NO: 13050 - protein, 28 aa, Artificial sequence
  synthetic peptide
WIYGGGFQTGTSSLHVYDGKFLARVERV

SEQ ID NO: 13051 - protein, 28 aa, Artificial sequence
  synthetic peptide
IYGGGFQTGTSSLHVYDGKFLARVERVI

SEQ ID NO: 13052 - protein, 28 aa, Artificial sequence
  synthetic peptide
YGGGFQTGTSSLHVYDGKFLARVERVIV

SEQ ID NO: 13053 - protein, 28 aa, Artificial sequence
  synthetic peptide
GGGFQTGTSSLHVYDGKFLARVERVIVV

SEQ ID NO: 13054 - protein, 28 aa, Artificial sequence
  synthetic peptide
GGFQTGTSSLHVYDGKFLARVERVIVVS

SEQ ID NO: 13055 - protein, 28 aa, Artificial sequence
  synthetic peptide
GFQTGTSSLHVYDGKFLARVERVIVVSM

SEQ ID NO: 13056 - protein, 28 aa, Artificial sequence
  synthetic peptide
FQTGTSSLHVYDGKFLARVERVIVVSMN

SEQ ID NO: 13057 - protein, 28 aa, Artificial sequence
  synthetic peptide
QTGTSSLHVYDGKFLARVERVIVVSMNY

SEQ ID NO: 13058 - protein, 28 aa, Artificial sequence
  synthetic peptide
TGTSSLHVYDGKFLARVERVIVVSMNYR

SEQ ID NO: 13059 - protein, 28 aa, Artificial sequence
  synthetic peptide
GTSSLHVYDGKFLARVERVIVVSMNYRV

SEQ ID NO: 13060 - protein, 28 aa, Artificial sequence
  synthetic peptide
TSSLHVYDGKFLARVERVIVVSMNYRVG

SEQ ID NO: 13061 - protein, 28 aa, Artificial sequence
  synthetic peptide
SSLHVYDGKFLARVERVIVVSMNYRVGA

SEQ ID NO: 13062 - protein, 28 aa, Artificial sequence
  synthetic peptide
SLHVYDGKFLARVERVIVVSMNYRVGAL

SEQ ID NO: 13063 - protein, 28 aa, Artificial sequence
  synthetic peptide
LHVYDGKFLARVERVIVVSMNYRVGALG

SEQ ID NO: 13064 - protein, 28 aa, Artificial sequence
  synthetic peptide
HVYDGKFLARVERVIVVSMNYRVGALGF

SEQ ID NO: 13065 - protein, 28 aa, Artificial sequence
  synthetic peptide
VYDGKFLARVERVIVVSMNYRVGALGFL

SEQ ID NO: 13066 - protein, 28 aa, Artificial sequence
  synthetic peptide
YDGKFLARVERVIVVSMNYRVGALGFLA

SEQ ID NO: 13067 - protein, 28 aa, Artificial sequence
  synthetic peptide
DGKFLARVERVIVVSMNYRVGALGFLAL

SEQ ID NO: 13068 - protein, 28 aa, Artificial sequence
  synthetic peptide
GKFLARVERVIVVSMNYRVGALGFLALP

SEQ ID NO: 13069 - protein, 28 aa, Artificial sequence
  synthetic peptide
KFLARVERVIVVSMNYRVGALGFLALPG

SEQ ID NO: 13070 - protein, 28 aa, Artificial sequence
  synthetic peptide
FLARVERVIVVSMNYRVGALGFLALPGN

SEQ ID NO: 13071 - protein, 28 aa, Artificial sequence
  synthetic peptide
LARVERVIVVSMNYRVGALGFLALPGNP

SEQ ID NO: 13072 - protein, 28 aa, Artificial sequence
  synthetic peptide
ARVERVIVVSMNYRVGALGFLALPGNPE

SEQ ID NO: 13073 - protein, 28 aa, Artificial sequence
  synthetic peptide
RVERVIVVSMNYRVGALGFLALPGNPEA

SEQ ID NO: 13074 - protein, 28 aa, Artificial sequence
  synthetic peptide
VERVIVVSMNYRVGALGFLALPGNPEAP

SEQ ID NO: 13075 - protein, 28 aa, Artificial sequence
  synthetic peptide
ERVIVVSMNYRVGALGFLALPGNPEAPG

SEQ ID NO: 13076 - protein, 28 aa, Artificial sequence
  synthetic peptide
RVIVVSMNYRVGALGFLALPGNPEAPGN

SEQ ID NO: 13077 - protein, 28 aa, Artificial sequence
  synthetic peptide
VIVVSMNYRVGALGFLALPGNPEAPGNM

SEQ ID NO: 13078 - protein, 28 aa, Artificial sequence
  synthetic peptide
IVVSMNYRVGALGFLALPGNPEAPGNMG

SEQ ID NO: 13079 - protein, 28 aa, Artificial sequence
  synthetic peptide
VVSMNYRVGALGFLALPGNPEAPGNMGL

SEQ ID NO: 13080 - protein, 28 aa, Artificial sequence
  synthetic peptide
VSMNYRVGALGFLALPGNPEAPGNMGLF

SEQ ID NO: 13081 - protein, 28 aa, Artificial sequence
  synthetic peptide
SMNYRVGALGFLALPGNPEAPGNMGLFD

SEQ ID NO: 13082 - protein, 28 aa, Artificial sequence
  synthetic peptide
MNYRVGALGFLALPGNPEAPGNMGLFDQ

SEQ ID NO: 13083 - protein, 28 aa, Artificial sequence
  synthetic peptide
NYRVGALGFLALPGNPEAPGNMGLFDQQ

SEQ ID NO: 13084 - protein, 28 aa, Artificial sequence
  synthetic peptide
YRVGALGFLALPGNPEAPGNMGLFDQQL

SEQ ID NO: 13085 - protein, 28 aa, Artificial sequence
  synthetic peptide
RVGALGFLALPGNPEAPGNMGLFDQQLA

SEQ ID NO: 13086 - protein, 28 aa, Artificial sequence
  synthetic peptide
VGALGFLALPGNPEAPGNMGLFDQQLAL

SEQ ID NO: 13087 - protein, 28 aa, Artificial sequence
  synthetic peptide
GALGFLALPGNPEAPGNMGLFDQQLALQ

SEQ ID NO: 13088 - protein, 28 aa, Artificial sequence
  synthetic peptide
ALGFLALPGNPEAPGNMGLFDQQLALQW

SEQ ID NO: 13089 - protein, 28 aa, Artificial sequence
  synthetic peptide
LGFLALPGNPEAPGNMGLFDQQLALQWV

SEQ ID NO: 13090 - protein, 28 aa, Artificial sequence
  synthetic peptide
GFLALPGNPEAPGNMGLFDQQLALQWVQ

SEQ ID NO: 13091 - protein, 28 aa, Artificial sequence
  synthetic peptide
FLALPGNPEAPGNMGLFDQQLALQWVQK

SEQ ID NO: 13092 - protein, 28 aa, Artificial sequence
  synthetic peptide
LALPGNPEAPGNMGLFDQQLALQWVQKN

SEQ ID NO: 13093 - protein, 28 aa, Artificial sequence
  synthetic peptide
ALPGNPEAPGNMGLFDQQLALQWVQKNI

SEQ ID NO: 13094 - protein, 28 aa, Artificial sequence
  synthetic peptide
LPGNPEAPGNMGLFDQQLALQWVQKNIA

SEQ ID NO: 13095 - protein, 28 aa, Artificial sequence
  synthetic peptide
PGNPEAPGNMGLFDQQLALQWVQKNIAA

SEQ ID NO: 13096 - protein, 28 aa, Artificial sequence
  synthetic peptide
GNPEAPGNMGLFDQQLALQWVQKNIAAF

SEQ ID NO: 13097 - protein, 28 aa, Artificial sequence
  synthetic peptide
NPEAPGNMGLFDQQLALQWVQKNIAAFG

SEQ ID NO: 13098 - protein, 28 aa, Artificial sequence
  synthetic peptide
PEAPGNMGLFDQQLALQWVQKNIAAFGG

SEQ ID NO: 13099 - protein, 28 aa, Artificial sequence
  synthetic peptide
EAPGNMGLFDQQLALQWVQKNIAAFGGN

SEQ ID NO: 13100 - protein, 28 aa, Artificial sequence
  synthetic peptide
APGNMGLFDQQLALQWVQKNIAAFGGNP

SEQ ID NO: 13101 - protein, 28 aa, Artificial sequence
  synthetic peptide
PGNMGLFDQQLALQWVQKNIAAFGGNPK

SEQ ID NO: 13102 - protein, 28 aa, Artificial sequence
  synthetic peptide
GNMGLFDQQLALQWVQKNIAAFGGNPKS

SEQ ID NO: 13103 - protein, 28 aa, Artificial sequence
  synthetic peptide
NMGLFDQQLALQWVQKNIAAFGGNPKSV

SEQ ID NO: 13104 - protein, 28 aa, Artificial sequence
  synthetic peptide
MGLFDQQLALQWVQKNIAAFGGNPKSVT

SEQ ID NO: 13105 - protein, 28 aa, Artificial sequence
  synthetic peptide
GLFDQQLALQWVQKNIAAFGGNPKSVTL

SEQ ID NO: 13106 - protein, 28 aa, Artificial sequence
  synthetic peptide
LFDQQLALQWVQKNIAAFGGNPKSVTLF

SEQ ID NO: 13107 - protein, 28 aa, Artificial sequence
  synthetic peptide
FDQQLALQWVQKNIAAFGGNPKSVTLFG

SEQ ID NO: 13108 - protein, 28 aa, Artificial sequence
  synthetic peptide
DQQLALQWVQKNIAAFGGNPKSVTLFGE

SEQ ID NO: 13109 - protein, 28 aa, Artificial sequence
  synthetic peptide
QQLALQWVQKNIAAFGGNPKSVTLFGES

SEQ ID NO: 13110 - protein, 28 aa, Artificial sequence
  synthetic peptide
QLALQWVQKNIAAFGGNPKSVTLFGESA

SEQ ID NO: 13111 - protein, 28 aa, Artificial sequence
  synthetic peptide
LALQWVQKNIAAFGGNPKSVTLFGESAG

SEQ ID NO: 13112 - protein, 28 aa, Artificial sequence
  synthetic peptide
ALQWVQKNIAAFGGNPKSVTLFGESAGA

SEQ ID NO: 13113 - protein, 28 aa, Artificial sequence
  synthetic peptide
LQWVQKNIAAFGGNPKSVTLFGESAGAA

SEQ ID NO: 13114 - protein, 28 aa, Artificial sequence
  synthetic peptide
QWVQKNIAAFGGNPKSVTLFGESAGAAS

SEQ ID NO: 13115 - protein, 28 aa, Artificial sequence
  synthetic peptide
WVQKNIAAFGGNPKSVTLFGESAGAASV

SEQ ID NO: 13116 - protein, 28 aa, Artificial sequence
  synthetic peptide
VQKNIAAFGGNPKSVTLFGESAGAASVS

SEQ ID NO: 13117 - protein, 28 aa, Artificial sequence
  synthetic peptide
QKNIAAFGGNPKSVTLFGESAGAASVSL

SEQ ID NO: 13118 - protein, 28 aa, Artificial sequence
  synthetic peptide
KNIAAFGGNPKSVTLFGESAGAASVSLH

SEQ ID NO: 13119 - protein, 28 aa, Artificial sequence
  synthetic peptide
NIAAFGGNPKSVTLFGESAGAASVSLHL

SEQ ID NO: 13120 - protein, 28 aa, Artificial sequence
  synthetic peptide
IAAFGGNPKSVTLFGESAGAASVSLHLL

SEQ ID NO: 13121 - protein, 28 aa, Artificial sequence
  synthetic peptide
AAFGGNPKSVTLFGESAGAASVSLHLLS

SEQ ID NO: 13122 - protein, 28 aa, Artificial sequence
  synthetic peptide
AFGGNPKSVTLFGESAGAASVSLHLLSP

SEQ ID NO: 13123 - protein, 28 aa, Artificial sequence
  synthetic peptide
FGGNPKSVTLFGESAGAASVSLHLLSPG

SEQ ID NO: 13124 - protein, 28 aa, Artificial sequence
  synthetic peptide
GGNPKSVTLFGESAGAASVSLHLLSPGS

SEQ ID NO: 13125 - protein, 28 aa, Artificial sequence
  synthetic peptide
GNPKSVTLFGESAGAASVSLHLLSPGSH

SEQ ID NO: 13126 - protein, 28 aa, Artificial sequence
  synthetic peptide
NPKSVTLFGESAGAASVSLHLLSPGSHS

SEQ ID NO: 13127 - protein, 28 aa, Artificial sequence
  synthetic peptide
PKSVTLFGESAGAASVSLHLLSPGSHSL

SEQ ID NO: 13128 - protein, 28 aa, Artificial sequence
  synthetic peptide
KSVTLFGESAGAASVSLHLLSPGSHSLF

SEQ ID NO: 13129 - protein, 28 aa, Artificial sequence
  synthetic peptide
SVTLFGESAGAASVSLHLLSPGSHSLFT

SEQ ID NO: 13130 - protein, 28 aa, Artificial sequence
  synthetic peptide
VTLFGESAGAASVSLHLLSPGSHSLFTR

SEQ ID NO: 13131 - protein, 28 aa, Artificial sequence
  synthetic peptide
TLFGESAGAASVSLHLLSPGSHSLFTRA

SEQ ID NO: 13132 - protein, 28 aa, Artificial sequence
  synthetic peptide
LFGESAGAASVSLHLLSPGSHSLFTRAI

SEQ ID NO: 13133 - protein, 28 aa, Artificial sequence
  synthetic peptide
FGESAGAASVSLHLLSPGSHSLFTRAIL

SEQ ID NO: 13134 - protein, 28 aa, Artificial sequence
  synthetic peptide
GESAGAASVSLHLLSPGSHSLFTRAILQ

SEQ ID NO: 13135 - protein, 28 aa, Artificial sequence
  synthetic peptide
ESAGAASVSLHLLSPGSHSLFTRAILQS

SEQ ID NO: 13136 - protein, 28 aa, Artificial sequence
  synthetic peptide
SAGAASVSLHLLSPGSHSLFTRAILQSG

SEQ ID NO: 13137 - protein, 28 aa, Artificial sequence
  synthetic peptide
AGAASVSLHLLSPGSHSLFTRAILQSGS

SEQ ID NO: 13138 - protein, 28 aa, Artificial sequence
  synthetic peptide
GAASVSLHLLSPGSHSLFTRAILQSGSF

SEQ ID NO: 13139 - protein, 28 aa, Artificial sequence
  synthetic peptide
AASVSLHLLSPGSHSLFTRAILQSGSFN

SEQ ID NO: 13140 - protein, 28 aa, Artificial sequence
  synthetic peptide
ASVSLHLLSPGSHSLFTRAILQSGSFNA

SEQ ID NO: 13141 - protein, 28 aa, Artificial sequence
  synthetic peptide
SVSLHLLSPGSHSLFTRAILQSGSFNAP

SEQ ID NO: 13142 - protein, 28 aa, Artificial sequence
  synthetic peptide
VSLHLLSPGSHSLFTRAILQSGSFNAPW

SEQ ID NO: 13143 - protein, 28 aa, Artificial sequence
  synthetic peptide
SLHLLSPGSHSLFTRAILQSGSFNAPWA

SEQ ID NO: 13144 - protein, 28 aa, Artificial sequence
  synthetic peptide
LHLLSPGSHSLFTRAILQSGSFNAPWAV

SEQ ID NO: 13145 - protein, 28 aa, Artificial sequence
  synthetic peptide
HLLSPGSHSLFTRAILQSGSFNAPWAVT

SEQ ID NO: 13146 - protein, 28 aa, Artificial sequence
  synthetic peptide
LLSPGSHSLFTRAILQSGSFNAPWAVTS

SEQ ID NO: 13147 - protein, 28 aa, Artificial sequence
  synthetic peptide
LSPGSHSLFTRAILQSGSFNAPWAVTSL

SEQ ID NO: 13148 - protein, 28 aa, Artificial sequence
  synthetic peptide
SPGSHSLFTRAILQSGSFNAPWAVTSLY

SEQ ID NO: 13149 - protein, 28 aa, Artificial sequence
  synthetic peptide
PGSHSLFTRAILQSGSFNAPWAVTSLYE

SEQ ID NO: 13150 - protein, 28 aa, Artificial sequence
  synthetic peptide
GSHSLFTRAILQSGSFNAPWAVTSLYEA

SEQ ID NO: 13151 - protein, 28 aa, Artificial sequence
  synthetic peptide
SHSLFTRAILQSGSFNAPWAVTSLYEAR

SEQ ID NO: 13152 - protein, 28 aa, Artificial sequence
  synthetic peptide
HSLFTRAILQSGSFNAPWAVTSLYEARN

SEQ ID NO: 13153 - protein, 28 aa, Artificial sequence
  synthetic peptide
SLFTRAILQSGSFNAPWAVTSLYEARNR

SEQ ID NO: 13154 - protein, 28 aa, Artificial sequence
  synthetic peptide
LFTRAILQSGSFNAPWAVTSLYEARNRT

SEQ ID NO: 13155 - protein, 28 aa, Artificial sequence
  synthetic peptide
FTRAILQSGSFNAPWAVTSLYEARNRTL

SEQ ID NO: 13156 - protein, 28 aa, Artificial sequence
  synthetic peptide
TRAILQSGSFNAPWAVTSLYEARNRTLN

SEQ ID NO: 13157 - protein, 28 aa, Artificial sequence
  synthetic peptide
RAILQSGSFNAPWAVTSLYEARNRTLNL

SEQ ID NO: 13158 - protein, 28 aa, Artificial sequence
  synthetic peptide
AILQSGSFNAPWAVTSLYEARNRTLNLA

SEQ ID NO: 13159 - protein, 28 aa, Artificial sequence
  synthetic peptide
ILQSGSFNAPWAVTSLYEARNRTLNLAK

SEQ ID NO: 13160 - protein, 28 aa, Artificial sequence
  synthetic peptide
LQSGSFNAPWAVTSLYEARNRTLNLAKL

SEQ ID NO: 13161 - protein, 28 aa, Artificial sequence
  synthetic peptide
QSGSFNAPWAVTSLYEARNRTLNLAKLT

SEQ ID NO: 13162 - protein, 28 aa, Artificial sequence
  synthetic peptide
SGSFNAPWAVTSLYEARNRTLNLAKLTG

SEQ ID NO: 13163 - protein, 28 aa, Artificial sequence
  synthetic peptide
GSFNAPWAVTSLYEARNRTLNLAKLTGC

SEQ ID NO: 13164 - protein, 28 aa, Artificial sequence
  synthetic peptide
SFNAPWAVTSLYEARNRTLNLAKLTGCS

SEQ ID NO: 13165 - protein, 28 aa, Artificial sequence
  synthetic peptide
FNAPWAVTSLYEARNRTLNLAKLTGCSR

SEQ ID NO: 13166 - protein, 28 aa, Artificial sequence
  synthetic peptide
NAPWAVTSLYEARNRTLNLAKLTGCSRE

SEQ ID NO: 13167 - protein, 28 aa, Artificial sequence
  synthetic peptide
APWAVTSLYEARNRTLNLAKLTGCSREN

SEQ ID NO: 13168 - protein, 28 aa, Artificial sequence
  synthetic peptide
PWAVTSLYEARNRTLNLAKLTGCSRENE

SEQ ID NO: 13169 - protein, 28 aa, Artificial sequence
  synthetic peptide
WAVTSLYEARNRTLNLAKLTGCSRENET

SEQ ID NO: 13170 - protein, 28 aa, Artificial sequence
  synthetic peptide
AVTSLYEARNRTLNLAKLTGCSRENETE

SEQ ID NO: 13171 - protein, 28 aa, Artificial sequence
  synthetic peptide
VTSLYEARNRTLNLAKLTGCSRENETEI

SEQ ID NO: 13172 - protein, 28 aa, Artificial sequence
  synthetic peptide
TSLYEARNRTLNLAKLTGCSRENETEII

SEQ ID NO: 13173 - protein, 28 aa, Artificial sequence
  synthetic peptide
SLYEARNRTLNLAKLTGCSRENETEIIK

SEQ ID NO: 13174 - protein, 28 aa, Artificial sequence
  synthetic peptide
LYEARNRTLNLAKLTGCSRENETEIIKC

SEQ ID NO: 13175 - protein, 28 aa, Artificial sequence
  synthetic peptide
YEARNRTLNLAKLTGCSRENETEIIKCL

SEQ ID NO: 13176 - protein, 28 aa, Artificial sequence
  synthetic peptide
EARNRTLNLAKLTGCSRENETEIIKCLR

SEQ ID NO: 13177 - protein, 28 aa, Artificial sequence
  synthetic peptide
ARNRTLNLAKLTGCSRENETEIIKCLRN

SEQ ID NO: 13178 - protein, 28 aa, Artificial sequence
  synthetic peptide
RNRTLNLAKLTGCSRENETEIIKCLRNK

SEQ ID NO: 13179 - protein, 28 aa, Artificial sequence
  synthetic peptide
NRTLNLAKLTGCSRENETEIIKCLRNKD

SEQ ID NO: 13180 - protein, 28 aa, Artificial sequence
  synthetic peptide
RTLNLAKLTGCSRENETEIIKCLRNKDP

SEQ ID NO: 13181 - protein, 28 aa, Artificial sequence
  synthetic peptide
TLNLAKLTGCSRENETEIIKCLRNKDPQ

SEQ ID NO: 13182 - protein, 28 aa, Artificial sequence
  synthetic peptide
LNLAKLTGCSRENETEIIKCLRNKDPQE

SEQ ID NO: 13183 - protein, 28 aa, Artificial sequence
  synthetic peptide
NLAKLTGCSRENETEIIKCLRNKDPQEI

SEQ ID NO: 13184 - protein, 28 aa, Artificial sequence
  synthetic peptide
LAKLTGCSRENETEIIKCLRNKDPQEIL

SEQ ID NO: 13185 - protein, 28 aa, Artificial sequence
  synthetic peptide
AKLTGCSRENETEIIKCLRNKDPQEILL

SEQ ID NO: 13186 - protein, 28 aa, Artificial sequence
  synthetic peptide
KLTGCSRENETEIIKCLRNKDPQEILLN

SEQ ID NO: 13187 - protein, 28 aa, Artificial sequence
  synthetic peptide
LTGCSRENETEIIKCLRNKDPQEILLNE

SEQ ID NO: 13188 - protein, 28 aa, Artificial sequence
  synthetic peptide
TGCSRENETEIIKCLRNKDPQEILLNEA

SEQ ID NO: 13189 - protein, 28 aa, Artificial sequence
  synthetic peptide
GCSRENETEIIKCLRNKDPQEILLNEAF

SEQ ID NO: 13190 - protein, 28 aa, Artificial sequence
  synthetic peptide
CSRENETEIIKCLRNKDPQEILLNEAFV

SEQ ID NO: 13191 - protein, 28 aa, Artificial sequence
  synthetic peptide
SRENETEIIKCLRNKDPQEILLNEAFVV

SEQ ID NO: 13192 - protein, 28 aa, Artificial sequence
  synthetic peptide
RENETEIIKCLRNKDPQEILLNEAFVVP

SEQ ID NO: 13193 - protein, 28 aa, Artificial sequence
  synthetic peptide
ENETEIIKCLRNKDPQEILLNEAFVVPY

SEQ ID NO: 13194 - protein, 28 aa, Artificial sequence
  synthetic peptide
NETEIIKCLRNKDPQEILLNEAFVVPYG

SEQ ID NO: 13195 - protein, 28 aa, Artificial sequence
  synthetic peptide
ETEIIKCLRNKDPQEILLNEAFVVPYGT

SEQ ID NO: 13196 - protein, 28 aa, Artificial sequence
  synthetic peptide
TEIIKCLRNKDPQEILLNEAFVVPYGTP

SEQ ID NO: 13197 - protein, 28 aa, Artificial sequence
  synthetic peptide
EIIKCLRNKDPQEILLNEAFVVPYGTPL

SEQ ID NO: 13198 - protein, 28 aa, Artificial sequence
  synthetic peptide
IIKCLRNKDPQEILLNEAFVVPYGTPLS

SEQ ID NO: 13199 - protein, 28 aa, Artificial sequence
  synthetic peptide
IKCLRNKDPQEILLNEAFVVPYGTPLSV

SEQ ID NO: 13200 - protein, 28 aa, Artificial sequence
  synthetic peptide
KCLRNKDPQEILLNEAFVVPYGTPLSVN

SEQ ID NO: 13201 - protein, 28 aa, Artificial sequence
  synthetic peptide
CLRNKDPQEILLNEAFVVPYGTPLSVNF

SEQ ID NO: 13202 - protein, 28 aa, Artificial sequence
  synthetic peptide
LRNKDPQEILLNEAFVVPYGTPLSVNFG

SEQ ID NO: 13203 - protein, 28 aa, Artificial sequence
  synthetic peptide
RNKDPQEILLNEAFVVPYGTPLSVNFGP

SEQ ID NO: 13204 - protein, 28 aa, Artificial sequence
  synthetic peptide
NKDPQEILLNEAFVVPYGTPLSVNFGPT

SEQ ID NO: 13205 - protein, 28 aa, Artificial sequence
  synthetic peptide
KDPQEILLNEAFVVPYGTPLSVNFGPTV

SEQ ID NO: 13206 - protein, 28 aa, Artificial sequence
  synthetic peptide
DPQEILLNEAFVVPYGTPLSVNFGPTVD

SEQ ID NO: 13207 - protein, 28 aa, Artificial sequence
  synthetic peptide
PQEILLNEAFVVPYGTPLSVNFGPTVDG

SEQ ID NO: 13208 - protein, 28 aa, Artificial sequence
  synthetic peptide
QEILLNEAFVVPYGTPLSVNFGPTVDGD

SEQ ID NO: 13209 - protein, 28 aa, Artificial sequence
  synthetic peptide
EILLNEAFVVPYGTPLSVNFGPTVDGDF

SEQ ID NO: 13210 - protein, 28 aa, Artificial sequence
  synthetic peptide
ILLNEAFVVPYGTPLSVNFGPTVDGDFL

SEQ ID NO: 13211 - protein, 28 aa, Artificial sequence
  synthetic peptide
LLNEAFVVPYGTPLSVNFGPTVDGDFLT

SEQ ID NO: 13212 - protein, 28 aa, Artificial sequence
  synthetic peptide
LNEAFVVPYGTPLSVNFGPTVDGDFLTD

SEQ ID NO: 13213 - protein, 28 aa, Artificial sequence
  synthetic peptide
NEAFVVPYGTPLSVNFGPTVDGDFLTDM

SEQ ID NO: 13214 - protein, 28 aa, Artificial sequence
  synthetic peptide
EAFVVPYGTPLSVNFGPTVDGDFLTDMP

SEQ ID NO: 13215 - protein, 28 aa, Artificial sequence
  synthetic peptide
AFVVPYGTPLSVNFGPTVDGDFLTDMPD

SEQ ID NO: 13216 - protein, 28 aa, Artificial sequence
  synthetic peptide
FVVPYGTPLSVNFGPTVDGDFLTDMPDI

SEQ ID NO: 13217 - protein, 28 aa, Artificial sequence
  synthetic peptide
VVPYGTPLSVNFGPTVDGDFLTDMPDIL

SEQ ID NO: 13218 - protein, 28 aa, Artificial sequence
  synthetic peptide
VPYGTPLSVNFGPTVDGDFLTDMPDILL

SEQ ID NO: 13219 - protein, 28 aa, Artificial sequence
  synthetic peptide
PYGTPLSVNFGPTVDGDFLTDMPDILLE

SEQ ID NO: 13220 - protein, 28 aa, Artificial sequence
  synthetic peptide
YGTPLSVNFGPTVDGDFLTDMPDILLEL

SEQ ID NO: 13221 - protein, 28 aa, Artificial sequence
  synthetic peptide
GTPLSVNFGPTVDGDFLTDMPDILLELG

SEQ ID NO: 13222 - protein, 28 aa, Artificial sequence
  synthetic peptide
TPLSVNFGPTVDGDFLTDMPDILLELGQ

SEQ ID NO: 13223 - protein, 28 aa, Artificial sequence
  synthetic peptide
PLSVNFGPTVDGDFLTDMPDILLELGQF

SEQ ID NO: 13224 - protein, 28 aa, Artificial sequence
  synthetic peptide
LSVNFGPTVDGDFLTDMPDILLELGQFK

SEQ ID NO: 13225 - protein, 28 aa, Artificial sequence
  synthetic peptide
SVNFGPTVDGDFLTDMPDILLELGQFKK

SEQ ID NO: 13226 - protein, 28 aa, Artificial sequence
  synthetic peptide
VNFGPTVDGDFLTDMPDILLELGQFKKT

SEQ ID NO: 13227 - protein, 28 aa, Artificial sequence
  synthetic peptide
NFGPTVDGDFLTDMPDILLELGQFKKTQ

SEQ ID NO: 13228 - protein, 28 aa, Artificial sequence
  synthetic peptide
FGPTVDGDFLTDMPDILLELGQFKKTQI

SEQ ID NO: 13229 - protein, 28 aa, Artificial sequence
  synthetic peptide
GPTVDGDFLTDMPDILLELGQFKKTQIL

SEQ ID NO: 13230 - protein, 28 aa, Artificial sequence
  synthetic peptide
PTVDGDFLTDMPDILLELGQFKKTQILV

SEQ ID NO: 13231 - protein, 28 aa, Artificial sequence
  synthetic peptide
TVDGDFLTDMPDILLELGQFKKTQILVG

SEQ ID NO: 13232 - protein, 28 aa, Artificial sequence
  synthetic peptide
VDGDFLTDMPDILLELGQFKKTQILVGV

SEQ ID NO: 13233 - protein, 28 aa, Artificial sequence
  synthetic peptide
DGDFLTDMPDILLELGQFKKTQILVGVN

SEQ ID NO: 13234 - protein, 28 aa, Artificial sequence
  synthetic peptide
GDFLTDMPDILLELGQFKKTQILVGVNK

SEQ ID NO: 13235 - protein, 28 aa, Artificial sequence
  synthetic peptide
DFLTDMPDILLELGQFKKTQILVGVNKD

SEQ ID NO: 13236 - protein, 28 aa, Artificial sequence
  synthetic peptide
FLTDMPDILLELGQFKKTQILVGVNKDE

SEQ ID NO: 13237 - protein, 28 aa, Artificial sequence
  synthetic peptide
LTDMPDILLELGQFKKTQILVGVNKDEG

SEQ ID NO: 13238 - protein, 28 aa, Artificial sequence
  synthetic peptide
TDMPDILLELGQFKKTQILVGVNKDEGT

SEQ ID NO: 13239 - protein, 28 aa, Artificial sequence
  synthetic peptide
DMPDILLELGQFKKTQILVGVNKDEGTA

SEQ ID NO: 13240 - protein, 28 aa, Artificial sequence
  synthetic peptide
MPDILLELGQFKKTQILVGVNKDEGTAF

SEQ ID NO: 13241 - protein, 28 aa, Artificial sequence
  synthetic peptide
PDILLELGQFKKTQILVGVNKDEGTAFL

SEQ ID NO: 13242 - protein, 28 aa, Artificial sequence
  synthetic peptide
DILLELGQFKKTQILVGVNKDEGTAFLV

SEQ ID NO: 13243 - protein, 28 aa, Artificial sequence
  synthetic peptide
ILLELGQFKKTQILVGVNKDEGTAFLVY

SEQ ID NO: 13244 - protein, 28 aa, Artificial sequence
  synthetic peptide
LLELGQFKKTQILVGVNKDEGTAFLVYG

SEQ ID NO: 13245 - protein, 28 aa, Artificial sequence
  synthetic peptide
LELGQFKKTQILVGVNKDEGTAFLVYGA

SEQ ID NO: 13246 - protein, 28 aa, Artificial sequence
  synthetic peptide
ELGQFKKTQILVGVNKDEGTAFLVYGAP

SEQ ID NO: 13247 - protein, 28 aa, Artificial sequence
  synthetic peptide
LGQFKKTQILVGVNKDEGTAFLVYGAPG

SEQ ID NO: 13248 - protein, 28 aa, Artificial sequence
  synthetic peptide
GQFKKTQILVGVNKDEGTAFLVYGAPGF

SEQ ID NO: 13249 - protein, 28 aa, Artificial sequence
  synthetic peptide
QFKKTQILVGVNKDEGTAFLVYGAPGFS

SEQ ID NO: 13250 - protein, 28 aa, Artificial sequence
  synthetic peptide
FKKTQILVGVNKDEGTAFLVYGAPGFSK

SEQ ID NO: 13251 - protein, 28 aa, Artificial sequence
  synthetic peptide
KKTQILVGVNKDEGTAFLVYGAPGFSKD

SEQ ID NO: 13252 - protein, 28 aa, Artificial sequence
  synthetic peptide
KTQILVGVNKDEGTAFLVYGAPGFSKDN

SEQ ID NO: 13253 - protein, 28 aa, Artificial sequence
  synthetic peptide
TQILVGVNKDEGTAFLVYGAPGFSKDNN

SEQ ID NO: 13254 - protein, 28 aa, Artificial sequence
  synthetic peptide
QILVGVNKDEGTAFLVYGAPGFSKDNNS

SEQ ID NO: 13255 - protein, 28 aa, Artificial sequence
  synthetic peptide
ILVGVNKDEGTAFLVYGAPGFSKDNNSI

SEQ ID NO: 13256 - protein, 28 aa, Artificial sequence
  synthetic peptide
LVGVNKDEGTAFLVYGAPGFSKDNNSII

SEQ ID NO: 13257 - protein, 28 aa, Artificial sequence
  synthetic peptide
VGVNKDEGTAFLVYGAPGFSKDNNSIIT

SEQ ID NO: 13258 - protein, 28 aa, Artificial sequence
  synthetic peptide
GVNKDEGTAFLVYGAPGFSKDNNSIITR

SEQ ID NO: 13259 - protein, 28 aa, Artificial sequence
  synthetic peptide
VNKDEGTAFLVYGAPGFSKDNNSIITRK

SEQ ID NO: 13260 - protein, 28 aa, Artificial sequence
  synthetic peptide
NKDEGTAFLVYGAPGFSKDNNSIITRKE

SEQ ID NO: 13261 - protein, 28 aa, Artificial sequence
  synthetic peptide
KDEGTAFLVYGAPGFSKDNNSIITRKEF

SEQ ID NO: 13262 - protein, 28 aa, Artificial sequence
  synthetic peptide
DEGTAFLVYGAPGFSKDNNSIITRKEFQ

SEQ ID NO: 13263 - protein, 28 aa, Artificial sequence
  synthetic peptide
EGTAFLVYGAPGFSKDNNSIITRKEFQE

SEQ ID NO: 13264 - protein, 28 aa, Artificial sequence
  synthetic peptide
GTAFLVYGAPGFSKDNNSIITRKEFQEG

SEQ ID NO: 13265 - protein, 28 aa, Artificial sequence
  synthetic peptide
TAFLVYGAPGFSKDNNSIITRKEFQEGL

SEQ ID NO: 13266 - protein, 28 aa, Artificial sequence
  synthetic peptide
AFLVYGAPGFSKDNNSIITRKEFQEGLK

SEQ ID NO: 13267 - protein, 28 aa, Artificial sequence
  synthetic peptide
FLVYGAPGFSKDNNSIITRKEFQEGLKI

SEQ ID NO: 13268 - protein, 28 aa, Artificial sequence
  synthetic peptide
LVYGAPGFSKDNNSIITRKEFQEGLKIF

SEQ ID NO: 13269 - protein, 28 aa, Artificial sequence
  synthetic peptide
VYGAPGFSKDNNSIITRKEFQEGLKIFF

SEQ ID NO: 13270 - protein, 28 aa, Artificial sequence
  synthetic peptide
YGAPGFSKDNNSIITRKEFQEGLKIFFP

SEQ ID NO: 13271 - protein, 28 aa, Artificial sequence
  synthetic peptide
GAPGFSKDNNSIITRKEFQEGLKIFFPG

SEQ ID NO: 13272 - protein, 28 aa, Artificial sequence
  synthetic peptide
APGFSKDNNSIITRKEFQEGLKIFFPGV

SEQ ID NO: 13273 - protein, 28 aa, Artificial sequence
  synthetic peptide
PGFSKDNNSIITRKEFQEGLKIFFPGVS

SEQ ID NO: 13274 - protein, 28 aa, Artificial sequence
  synthetic peptide
GFSKDNNSIITRKEFQEGLKIFFPGVSE

SEQ ID NO: 13275 - protein, 28 aa, Artificial sequence
  synthetic peptide
FSKDNNSIITRKEFQEGLKIFFPGVSEF

SEQ ID NO: 13276 - protein, 28 aa, Artificial sequence
  synthetic peptide
SKDNNSIITRKEFQEGLKIFFPGVSEFG

SEQ ID NO: 13277 - protein, 28 aa, Artificial sequence
  synthetic peptide
KDNNSIITRKEFQEGLKIFFPGVSEFGK

SEQ ID NO: 13278 - protein, 28 aa, Artificial sequence
  synthetic peptide
DNNSIITRKEFQEGLKIFFPGVSEFGKE

SEQ ID NO: 13279 - protein, 28 aa, Artificial sequence
  synthetic peptide
NNSIITRKEFQEGLKIFFPGVSEFGKES

SEQ ID NO: 13280 - protein, 28 aa, Artificial sequence
  synthetic peptide
NSIITRKEFQEGLKIFFPGVSEFGKESI

SEQ ID NO: 13281 - protein, 28 aa, Artificial sequence
  synthetic peptide
SIITRKEFQEGLKIFFPGVSEFGKESIL

SEQ ID NO: 13282 - protein, 28 aa, Artificial sequence
  synthetic peptide
IITRKEFQEGLKIFFPGVSEFGKESILF

SEQ ID NO: 13283 - protein, 28 aa, Artificial sequence
  synthetic peptide
ITRKEFQEGLKIFFPGVSEFGKESILFH

SEQ ID NO: 13284 - protein, 28 aa, Artificial sequence
  synthetic peptide
TRKEFQEGLKIFFPGVSEFGKESILFHY

SEQ ID NO: 13285 - protein, 28 aa, Artificial sequence
  synthetic peptide
RKEFQEGLKIFFPGVSEFGKESILFHYT

SEQ ID NO: 13286 - protein, 28 aa, Artificial sequence
  synthetic peptide
KEFQEGLKIFFPGVSEFGKESILFHYTD

SEQ ID NO: 13287 - protein, 28 aa, Artificial sequence
  synthetic peptide
EFQEGLKIFFPGVSEFGKESILFHYTDW

SEQ ID NO: 13288 - protein, 28 aa, Artificial sequence
  synthetic peptide
FQEGLKIFFPGVSEFGKESILFHYTDWV

SEQ ID NO: 13289 - protein, 28 aa, Artificial sequence
  synthetic peptide
QEGLKIFFPGVSEFGKESILFHYTDWVD

SEQ ID NO: 13290 - protein, 28 aa, Artificial sequence
  synthetic peptide
EGLKIFFPGVSEFGKESILFHYTDWVDD

SEQ ID NO: 13291 - protein, 28 aa, Artificial sequence
  synthetic peptide
GLKIFFPGVSEFGKESILFHYTDWVDDQ

SEQ ID NO: 13292 - protein, 28 aa, Artificial sequence
  synthetic peptide
LKIFFPGVSEFGKESILFHYTDWVDDQR

SEQ ID NO: 13293 - protein, 28 aa, Artificial sequence
  synthetic peptide
KIFFPGVSEFGKESILFHYTDWVDDQRP

SEQ ID NO: 13294 - protein, 28 aa, Artificial sequence
  synthetic peptide
IFFPGVSEFGKESILFHYTDWVDDQRPE

SEQ ID NO: 13295 - protein, 28 aa, Artificial sequence
  synthetic peptide
FFPGVSEFGKESILFHYTDWVDDQRPEN

SEQ ID NO: 13296 - protein, 28 aa, Artificial sequence
  synthetic peptide
FPGVSEFGKESILFHYTDWVDDQRPENY

SEQ ID NO: 13297 - protein, 28 aa, Artificial sequence
  synthetic peptide
PGVSEFGKESILFHYTDWVDDQRPENYR

SEQ ID NO: 13298 - protein, 28 aa, Artificial sequence
  synthetic peptide
GVSEFGKESILFHYTDWVDDQRPENYRE

SEQ ID NO: 13299 - protein, 28 aa, Artificial sequence
  synthetic peptide
VSEFGKESILFHYTDWVDDQRPENYREA

SEQ ID NO: 13300 - protein, 28 aa, Artificial sequence
  synthetic peptide
SEFGKESILFHYTDWVDDQRPENYREAL

SEQ ID NO: 13301 - protein, 28 aa, Artificial sequence
  synthetic peptide
EFGKESILFHYTDWVDDQRPENYREALG

SEQ ID NO: 13302 - protein, 28 aa, Artificial sequence
  synthetic peptide
FGKESILFHYTDWVDDQRPENYREALGD

SEQ ID NO: 13303 - protein, 28 aa, Artificial sequence
  synthetic peptide
GKESILFHYTDWVDDQRPENYREALGDV

SEQ ID NO: 13304 - protein, 28 aa, Artificial sequence
  synthetic peptide
KESILFHYTDWVDDQRPENYREALGDVV

SEQ ID NO: 13305 - protein, 28 aa, Artificial sequence
  synthetic peptide
ESILFHYTDWVDDQRPENYREALGDVVG

SEQ ID NO: 13306 - protein, 28 aa, Artificial sequence
  synthetic peptide
SILFHYTDWVDDQRPENYREALGDVVGD

SEQ ID NO: 13307 - protein, 28 aa, Artificial sequence
  synthetic peptide
ILFHYTDWVDDQRPENYREALGDVVGDY

SEQ ID NO: 13308 - protein, 28 aa, Artificial sequence
  synthetic peptide
LFHYTDWVDDQRPENYREALGDVVGDYN

SEQ ID NO: 13309 - protein, 28 aa, Artificial sequence
  synthetic peptide
FHYTDWVDDQRPENYREALGDVVGDYNF

SEQ ID NO: 13310 - protein, 28 aa, Artificial sequence
  synthetic peptide
HYTDWVDDQRPENYREALGDVVGDYNFI

SEQ ID NO: 13311 - protein, 28 aa, Artificial sequence
  synthetic peptide
YTDWVDDQRPENYREALGDVVGDYNFIC

SEQ ID NO: 13312 - protein, 28 aa, Artificial sequence
  synthetic peptide
TDWVDDQRPENYREALGDVVGDYNFICP

SEQ ID NO: 13313 - protein, 28 aa, Artificial sequence
  synthetic peptide
DWVDDQRPENYREALGDVVGDYNFICPA

SEQ ID NO: 13314 - protein, 28 aa, Artificial sequence
  synthetic peptide
WVDDQRPENYREALGDVVGDYNFICPAL

SEQ ID NO: 13315 - protein, 28 aa, Artificial sequence
  synthetic peptide
VDDQRPENYREALGDVVGDYNFICPALE

SEQ ID NO: 13316 - protein, 28 aa, Artificial sequence
  synthetic peptide
DDQRPENYREALGDVVGDYNFICPALEF

SEQ ID NO: 13317 - protein, 28 aa, Artificial sequence
  synthetic peptide
DQRPENYREALGDVVGDYNFICPALEFT

SEQ ID NO: 13318 - protein, 28 aa, Artificial sequence
  synthetic peptide
QRPENYREALGDVVGDYNFICPALEFTK

SEQ ID NO: 13319 - protein, 28 aa, Artificial sequence
  synthetic peptide
RPENYREALGDVVGDYNFICPALEFTKK

SEQ ID NO: 13320 - protein, 28 aa, Artificial sequence
  synthetic peptide
PENYREALGDVVGDYNFICPALEFTKKF

SEQ ID NO: 13321 - protein, 28 aa, Artificial sequence
  synthetic peptide
ENYREALGDVVGDYNFICPALEFTKKFS

SEQ ID NO: 13322 - protein, 28 aa, Artificial sequence
  synthetic peptide
NYREALGDVVGDYNFICPALEFTKKFSE

SEQ ID NO: 13323 - protein, 28 aa, Artificial sequence
  synthetic peptide
YREALGDVVGDYNFICPALEFTKKFSEW

SEQ ID NO: 13324 - protein, 28 aa, Artificial sequence
  synthetic peptide
REALGDVVGDYNFICPALEFTKKFSEWG

SEQ ID NO: 13325 - protein, 28 aa, Artificial sequence
  synthetic peptide
EALGDVVGDYNFICPALEFTKKFSEWGN

SEQ ID NO: 13326 - protein, 28 aa, Artificial sequence
  synthetic peptide
ALGDVVGDYNFICPALEFTKKFSEWGNN

SEQ ID NO: 13327 - protein, 28 aa, Artificial sequence
  synthetic peptide
LGDVVGDYNFICPALEFTKKFSEWGNNA

SEQ ID NO: 13328 - protein, 28 aa, Artificial sequence
  synthetic peptide
GDVVGDYNFICPALEFTKKFSEWGNNAF

SEQ ID NO: 13329 - protein, 28 aa, Artificial sequence
  synthetic peptide
DVVGDYNFICPALEFTKKFSEWGNNAFF

SEQ ID NO: 13330 - protein, 28 aa, Artificial sequence
  synthetic peptide
VVGDYNFICPALEFTKKFSEWGNNAFFY

SEQ ID NO: 13331 - protein, 28 aa, Artificial sequence
  synthetic peptide
VGDYNFICPALEFTKKFSEWGNNAFFYY

SEQ ID NO: 13332 - protein, 28 aa, Artificial sequence
  synthetic peptide
GDYNFICPALEFTKKFSEWGNNAFFYYF

SEQ ID NO: 13333 - protein, 28 aa, Artificial sequence
  synthetic peptide
DYNFICPALEFTKKFSEWGNNAFFYYFE

SEQ ID NO: 13334 - protein, 28 aa, Artificial sequence
  synthetic peptide
YNFICPALEFTKKFSEWGNNAFFYYFEH

SEQ ID NO: 13335 - protein, 28 aa, Artificial sequence
  synthetic peptide
NFICPALEFTKKFSEWGNNAFFYYFEHR

SEQ ID NO: 13336 - protein, 28 aa, Artificial sequence
  synthetic peptide
FICPALEFTKKFSEWGNNAFFYYFEHRS

SEQ ID NO: 13337 - protein, 28 aa, Artificial sequence
  synthetic peptide
ICPALEFTKKFSEWGNNAFFYYFEHRSS

SEQ ID NO: 13338 - protein, 28 aa, Artificial sequence
  synthetic peptide
CPALEFTKKFSEWGNNAFFYYFEHRSSK

SEQ ID NO: 13339 - protein, 28 aa, Artificial sequence
  synthetic peptide
PALEFTKKFSEWGNNAFFYYFEHRSSKL

SEQ ID NO: 13340 - protein, 28 aa, Artificial sequence
  synthetic peptide
ALEFTKKFSEWGNNAFFYYFEHRSSKLP

SEQ ID NO: 13341 - protein, 28 aa, Artificial sequence
  synthetic peptide
LEFTKKFSEWGNNAFFYYFEHRSSKLPW

SEQ ID NO: 13342 - protein, 28 aa, Artificial sequence
  synthetic peptide
EFTKKFSEWGNNAFFYYFEHRSSKLPWP

SEQ ID NO: 13343 - protein, 28 aa, Artificial sequence
  synthetic peptide
FTKKFSEWGNNAFFYYFEHRSSKLPWPE

SEQ ID NO: 13344 - protein, 28 aa, Artificial sequence
  synthetic peptide
TKKFSEWGNNAFFYYFEHRSSKLPWPEW

SEQ ID NO: 13345 - protein, 28 aa, Artificial sequence
  synthetic peptide
KKFSEWGNNAFFYYFEHRSSKLPWPEWM

SEQ ID NO: 13346 - protein, 28 aa, Artificial sequence
  synthetic peptide
KFSEWGNNAFFYYFEHRSSKLPWPEWMG

SEQ ID NO: 13347 - protein, 28 aa, Artificial sequence
  synthetic peptide
FSEWGNNAFFYYFEHRSSKLPWPEWMGV

SEQ ID NO: 13348 - protein, 28 aa, Artificial sequence
  synthetic peptide
SEWGNNAFFYYFEHRSSKLPWPEWMGVM

SEQ ID NO: 13349 - protein, 28 aa, Artificial sequence
  synthetic peptide
EWGNNAFFYYFEHRSSKLPWPEWMGVMH

SEQ ID NO: 13350 - protein, 28 aa, Artificial sequence
  synthetic peptide
WGNNAFFYYFEHRSSKLPWPEWMGVMHG

SEQ ID NO: 13351 - protein, 28 aa, Artificial sequence
  synthetic peptide
GNNAFFYYFEHRSSKLPWPEWMGVMHGY

SEQ ID NO: 13352 - protein, 28 aa, Artificial sequence
  synthetic peptide
NNAFFYYFEHRSSKLPWPEWMGVMHGYE

SEQ ID NO: 13353 - protein, 28 aa, Artificial sequence
  synthetic peptide
NAFFYYFEHRSSKLPWPEWMGVMHGYEI

SEQ ID NO: 13354 - protein, 28 aa, Artificial sequence
  synthetic peptide
AFFYYFEHRSSKLPWPEWMGVMHGYEIE

SEQ ID NO: 13355 - protein, 28 aa, Artificial sequence
  synthetic peptide
FFYYFEHRSSKLPWPEWMGVMHGYEIEF

SEQ ID NO: 13356 - protein, 28 aa, Artificial sequence
  synthetic peptide
FYYFEHRSSKLPWPEWMGVMHGYEIEFV

SEQ ID NO: 13357 - protein, 28 aa, Artificial sequence
  synthetic peptide
YYFEHRSSKLPWPEWMGVMHGYEIEFVF

SEQ ID NO: 13358 - protein, 28 aa, Artificial sequence
  synthetic peptide
YFEHRSSKLPWPEWMGVMHGYEIEFVFG

SEQ ID NO: 13359 - protein, 28 aa, Artificial sequence
  synthetic peptide
FEHRSSKLPWPEWMGVMHGYEIEFVFGL

SEQ ID NO: 13360 - protein, 28 aa, Artificial sequence
  synthetic peptide
EHRSSKLPWPEWMGVMHGYEIEFVFGLP

SEQ ID NO: 13361 - protein, 28 aa, Artificial sequence
  synthetic peptide
HRSSKLPWPEWMGVMHGYEIEFVFGLPL

SEQ ID NO: 13362 - protein, 28 aa, Artificial sequence
  synthetic peptide
RSSKLPWPEWMGVMHGYEIEFVFGLPLE

SEQ ID NO: 13363 - protein, 28 aa, Artificial sequence
  synthetic peptide
SSKLPWPEWMGVMHGYEIEFVFGLPLER

SEQ ID NO: 13364 - protein, 28 aa, Artificial sequence
  synthetic peptide
SKLPWPEWMGVMHGYEIEFVFGLPLERR

SEQ ID NO: 13365 - protein, 28 aa, Artificial sequence
  synthetic peptide
KLPWPEWMGVMHGYEIEFVFGLPLERRD

SEQ ID NO: 13366 - protein, 28 aa, Artificial sequence
  synthetic peptide
LPWPEWMGVMHGYEIEFVFGLPLERRDN

SEQ ID NO: 13367 - protein, 28 aa, Artificial sequence
  synthetic peptide
PWPEWMGVMHGYEIEFVFGLPLERRDNY

SEQ ID NO: 13368 - protein, 28 aa, Artificial sequence
  synthetic peptide
WPEWMGVMHGYEIEFVFGLPLERRDNYT

SEQ ID NO: 13369 - protein, 28 aa, Artificial sequence
  synthetic peptide
PEWMGVMHGYEIEFVFGLPLERRDNYTK

SEQ ID NO: 13370 - protein, 28 aa, Artificial sequence
  synthetic peptide
EWMGVMHGYEIEFVFGLPLERRDNYTKA

SEQ ID NO: 13371 - protein, 28 aa, Artificial sequence
  synthetic peptide
WMGVMHGYEIEFVFGLPLERRDNYTKAE

SEQ ID NO: 13372 - protein, 28 aa, Artificial sequence
  synthetic peptide
MGVMHGYEIEFVFGLPLERRDNYTKAEE

SEQ ID NO: 13373 - protein, 28 aa, Artificial sequence
  synthetic peptide
GVMHGYEIEFVFGLPLERRDNYTKAEEI

SEQ ID NO: 13374 - protein, 28 aa, Artificial sequence
  synthetic peptide
VMHGYEIEFVFGLPLERRDNYTKAEEIL

SEQ ID NO: 13375 - protein, 28 aa, Artificial sequence
  synthetic peptide
MHGYEIEFVFGLPLERRDNYTKAEEILS

SEQ ID NO: 13376 - protein, 28 aa, Artificial sequence
  synthetic peptide
HGYEIEFVFGLPLERRDNYTKAEEILSR

SEQ ID NO: 13377 - protein, 28 aa, Artificial sequence
  synthetic peptide
GYEIEFVFGLPLERRDNYTKAEEILSRS

SEQ ID NO: 13378 - protein, 28 aa, Artificial sequence
  synthetic peptide
YEIEFVFGLPLERRDNYTKAEEILSRSI

SEQ ID NO: 13379 - protein, 28 aa, Artificial sequence
  synthetic peptide
EIEFVFGLPLERRDNYTKAEEILSRSIV

SEQ ID NO: 13380 - protein, 28 aa, Artificial sequence
  synthetic peptide
IEFVFGLPLERRDNYTKAEEILSRSIVK

SEQ ID NO: 13381 - protein, 28 aa, Artificial sequence
  synthetic peptide
EFVFGLPLERRDNYTKAEEILSRSIVKR

SEQ ID NO: 13382 - protein, 28 aa, Artificial sequence
  synthetic peptide
FVFGLPLERRDNYTKAEEILSRSIVKRW

SEQ ID NO: 13383 - protein, 28 aa, Artificial sequence
  synthetic peptide
VFGLPLERRDNYTKAEEILSRSIVKRWA

SEQ ID NO: 13384 - protein, 28 aa, Artificial sequence
  synthetic peptide
FGLPLERRDNYTKAEEILSRSIVKRWAN

SEQ ID NO: 13385 - protein, 28 aa, Artificial sequence
  synthetic peptide
GLPLERRDNYTKAEEILSRSIVKRWANF

SEQ ID NO: 13386 - protein, 28 aa, Artificial sequence
  synthetic peptide
LPLERRDNYTKAEEILSRSIVKRWANFA

SEQ ID NO: 13387 - protein, 28 aa, Artificial sequence
  synthetic peptide
PLERRDNYTKAEEILSRSIVKRWANFAK

SEQ ID NO: 13388 - protein, 28 aa, Artificial sequence
  synthetic peptide
LERRDNYTKAEEILSRSIVKRWANFAKY

SEQ ID NO: 13389 - protein, 28 aa, Artificial sequence
  synthetic peptide
ERRDNYTKAEEILSRSIVKRWANFAKYG

SEQ ID NO: 13390 - protein, 28 aa, Artificial sequence
  synthetic peptide
RRDNYTKAEEILSRSIVKRWANFAKYGN

SEQ ID NO: 13391 - protein, 28 aa, Artificial sequence
  synthetic peptide
RDNYTKAEEILSRSIVKRWANFAKYGNP

SEQ ID NO: 13392 - protein, 28 aa, Artificial sequence
  synthetic peptide
DNYTKAEEILSRSIVKRWANFAKYGNPN

SEQ ID NO: 13393 - protein, 28 aa, Artificial sequence
  synthetic peptide
NYTKAEEILSRSIVKRWANFAKYGNPNE

SEQ ID NO: 13394 - protein, 28 aa, Artificial sequence
  synthetic peptide
YTKAEEILSRSIVKRWANFAKYGNPNET

SEQ ID NO: 13395 - protein, 28 aa, Artificial sequence
  synthetic peptide
TKAEEILSRSIVKRWANFAKYGNPNETQ

SEQ ID NO: 13396 - protein, 28 aa, Artificial sequence
  synthetic peptide
KAEEILSRSIVKRWANFAKYGNPNETQN

SEQ ID NO: 13397 - protein, 28 aa, Artificial sequence
  synthetic peptide
AEEILSRSIVKRWANFAKYGNPNETQNN

SEQ ID NO: 13398 - protein, 28 aa, Artificial sequence
  synthetic peptide
EEILSRSIVKRWANFAKYGNPNETQNNS

SEQ ID NO: 13399 - protein, 28 aa, Artificial sequence
  synthetic peptide
EILSRSIVKRWANFAKYGNPNETQNNST

SEQ ID NO: 13400 - protein, 28 aa, Artificial sequence
  synthetic peptide
ILSRSIVKRWANFAKYGNPNETQNNSTS

SEQ ID NO: 13401 - protein, 28 aa, Artificial sequence
  synthetic peptide
LSRSIVKRWANFAKYGNPNETQNNSTSW

SEQ ID NO: 13402 - protein, 28 aa, Artificial sequence
  synthetic peptide
SRSIVKRWANFAKYGNPNETQNNSTSWP

SEQ ID NO: 13403 - protein, 28 aa, Artificial sequence
  synthetic peptide
RSIVKRWANFAKYGNPNETQNNSTSWPV

SEQ ID NO: 13404 - protein, 28 aa, Artificial sequence
  synthetic peptide
SIVKRWANFAKYGNPNETQNNSTSWPVF

SEQ ID NO: 13405 - protein, 28 aa, Artificial sequence
  synthetic peptide
IVKRWANFAKYGNPNETQNNSTSWPVFK

SEQ ID NO: 13406 - protein, 28 aa, Artificial sequence
  synthetic peptide
VKRWANFAKYGNPNETQNNSTSWPVFKS

SEQ ID NO: 13407 - protein, 28 aa, Artificial sequence
  synthetic peptide
KRWANFAKYGNPNETQNNSTSWPVFKST

SEQ ID NO: 13408 - protein, 28 aa, Artificial sequence
  synthetic peptide
RWANFAKYGNPNETQNNSTSWPVFKSTE

SEQ ID NO: 13409 - protein, 28 aa, Artificial sequence
  synthetic peptide
WANFAKYGNPNETQNNSTSWPVFKSTEQ

SEQ ID NO: 13410 - protein, 28 aa, Artificial sequence
  synthetic peptide
ANFAKYGNPNETQNNSTSWPVFKSTEQK

SEQ ID NO: 13411 - protein, 28 aa, Artificial sequence
  synthetic peptide
NFAKYGNPNETQNNSTSWPVFKSTEQKY

SEQ ID NO: 13412 - protein, 28 aa, Artificial sequence
  synthetic peptide
FAKYGNPNETQNNSTSWPVFKSTEQKYL

SEQ ID NO: 13413 - protein, 28 aa, Artificial sequence
  synthetic peptide
AKYGNPNETQNNSTSWPVFKSTEQKYLT

SEQ ID NO: 13414 - protein, 28 aa, Artificial sequence
  synthetic peptide
KYGNPNETQNNSTSWPVFKSTEQKYLTL

SEQ ID NO: 13415 - protein, 28 aa, Artificial sequence
  synthetic peptide
YGNPNETQNNSTSWPVFKSTEQKYLTLN

SEQ ID NO: 13416 - protein, 28 aa, Artificial sequence
  synthetic peptide
GNPNETQNNSTSWPVFKSTEQKYLTLNT

SEQ ID NO: 13417 - protein, 28 aa, Artificial sequence
  synthetic peptide
NPNETQNNSTSWPVFKSTEQKYLTLNTE

SEQ ID NO: 13418 - protein, 28 aa, Artificial sequence
  synthetic peptide
PNETQNNSTSWPVFKSTEQKYLTLNTES

SEQ ID NO: 13419 - protein, 28 aa, Artificial sequence
  synthetic peptide
NETQNNSTSWPVFKSTEQKYLTLNTEST

SEQ ID NO: 13420 - protein, 28 aa, Artificial sequence
  synthetic peptide
ETQNNSTSWPVFKSTEQKYLTLNTESTR

SEQ ID NO: 13421 - protein, 28 aa, Artificial sequence
  synthetic peptide
TQNNSTSWPVFKSTEQKYLTLNTESTRI

SEQ ID NO: 13422 - protein, 28 aa, Artificial sequence
  synthetic peptide
QNNSTSWPVFKSTEQKYLTLNTESTRIM

SEQ ID NO: 13423 - protein, 28 aa, Artificial sequence
  synthetic peptide
NNSTSWPVFKSTEQKYLTLNTESTRIMT

SEQ ID NO: 13424 - protein, 28 aa, Artificial sequence
  synthetic peptide
NSTSWPVFKSTEQKYLTLNTESTRIMTK

SEQ ID NO: 13425 - protein, 28 aa, Artificial sequence
  synthetic peptide
STSWPVFKSTEQKYLTLNTESTRIMTKL

SEQ ID NO: 13426 - protein, 28 aa, Artificial sequence
  synthetic peptide
TSWPVFKSTEQKYLTLNTESTRIMTKLR

SEQ ID NO: 13427 - protein, 28 aa, Artificial sequence
  synthetic peptide
SWPVFKSTEQKYLTLNTESTRIMTKLRA

SEQ ID NO: 13428 - protein, 28 aa, Artificial sequence
  synthetic peptide
WPVFKSTEQKYLTLNTESTRIMTKLRAQ

SEQ ID NO: 13429 - protein, 28 aa, Artificial sequence
  synthetic peptide
PVFKSTEQKYLTLNTESTRIMTKLRAQQ

SEQ ID NO: 13430 - protein, 28 aa, Artificial sequence
  synthetic peptide
VFKSTEQKYLTLNTESTRIMTKLRAQQC

SEQ ID NO: 13431 - protein, 28 aa, Artificial sequence
  synthetic peptide
FKSTEQKYLTLNTESTRIMTKLRAQQCR

SEQ ID NO: 13432 - protein, 28 aa, Artificial sequence
  synthetic peptide
KSTEQKYLTLNTESTRIMTKLRAQQCRF

SEQ ID NO: 13433 - protein, 28 aa, Artificial sequence
  synthetic peptide
STEQKYLTLNTESTRIMTKLRAQQCRFW

SEQ ID NO: 13434 - protein, 28 aa, Artificial sequence
  synthetic peptide
TEQKYLTLNTESTRIMTKLRAQQCRFWT

SEQ ID NO: 13435 - protein, 28 aa, Artificial sequence
  synthetic peptide
EQKYLTLNTESTRIMTKLRAQQCRFWTS

SEQ ID NO: 13436 - protein, 28 aa, Artificial sequence
  synthetic peptide
QKYLTLNTESTRIMTKLRAQQCRFWTSF

SEQ ID NO: 13437 - protein, 28 aa, Artificial sequence
  synthetic peptide
KYLTLNTESTRIMTKLRAQQCRFWTSFF

SEQ ID NO: 13438 - protein, 28 aa, Artificial sequence
  synthetic peptide
YLTLNTESTRIMTKLRAQQCRFWTSFFP

SEQ ID NO: 13439 - protein, 28 aa, Artificial sequence
  synthetic peptide
LTLNTESTRIMTKLRAQQCRFWTSFFPK

SEQ ID NO: 13440 - protein, 28 aa, Artificial sequence
  synthetic peptide
TLNTESTRIMTKLRAQQCRFWTSFFPKV

SEQ ID NO: 13441 - protein, 28 aa, Artificial sequence
  synthetic peptide
LNTESTRIMTKLRAQQCRFWTSFFPKVL

SEQ ID NO: 13442 - protein, 28 aa, Artificial sequence
  synthetic peptide
NTESTRIMTKLRAQQCRFWTSFFPKVLE

SEQ ID NO: 13443 - protein, 28 aa, Artificial sequence
  synthetic peptide
TESTRIMTKLRAQQCRFWTSFFPKVLEM

SEQ ID NO: 13444 - protein, 28 aa, Artificial sequence
  synthetic peptide
ESTRIMTKLRAQQCRFWTSFFPKVLEMT

SEQ ID NO: 13445 - protein, 28 aa, Artificial sequence
  synthetic peptide
STRIMTKLRAQQCRFWTSFFPKVLEMTG

SEQ ID NO: 13446 - protein, 28 aa, Artificial sequence
  synthetic peptide
TRIMTKLRAQQCRFWTSFFPKVLEMTGN

SEQ ID NO: 13447 - protein, 28 aa, Artificial sequence
  synthetic peptide
RIMTKLRAQQCRFWTSFFPKVLEMTGNI

SEQ ID NO: 13448 - protein, 28 aa, Artificial sequence
  synthetic peptide
IMTKLRAQQCRFWTSFFPKVLEMTGNID

SEQ ID NO: 13449 - protein, 28 aa, Artificial sequence
  synthetic peptide
MTKLRAQQCRFWTSFFPKVLEMTGNIDE

SEQ ID NO: 13450 - protein, 28 aa, Artificial sequence
  synthetic peptide
TKLRAQQCRFWTSFFPKVLEMTGNIDEA

SEQ ID NO: 13451 - protein, 28 aa, Artificial sequence
  synthetic peptide
KLRAQQCRFWTSFFPKVLEMTGNIDEAE

SEQ ID NO: 13452 - protein, 28 aa, Artificial sequence
  synthetic peptide
LRAQQCRFWTSFFPKVLEMTGNIDEAEW

SEQ ID NO: 13453 - protein, 28 aa, Artificial sequence
  synthetic peptide
RAQQCRFWTSFFPKVLEMTGNIDEAEWE

SEQ ID NO: 13454 - protein, 28 aa, Artificial sequence
  synthetic peptide
AQQCRFWTSFFPKVLEMTGNIDEAEWEW

SEQ ID NO: 13455 - protein, 28 aa, Artificial sequence
  synthetic peptide
QQCRFWTSFFPKVLEMTGNIDEAEWEWK

SEQ ID NO: 13456 - protein, 28 aa, Artificial sequence
  synthetic peptide
QCRFWTSFFPKVLEMTGNIDEAEWEWKA

SEQ ID NO: 13457 - protein, 28 aa, Artificial sequence
  synthetic peptide
CRFWTSFFPKVLEMTGNIDEAEWEWKAG

SEQ ID NO: 13458 - protein, 28 aa, Artificial sequence
  synthetic peptide
RFWTSFFPKVLEMTGNIDEAEWEWKAGF

SEQ ID NO: 13459 - protein, 28 aa, Artificial sequence
  synthetic peptide
FWTSFFPKVLEMTGNIDEAEWEWKAGFH

SEQ ID NO: 13460 - protein, 28 aa, Artificial sequence
  synthetic peptide
WTSFFPKVLEMTGNIDEAEWEWKAGFHR

SEQ ID NO: 13461 - protein, 28 aa, Artificial sequence
  synthetic peptide
TSFFPKVLEMTGNIDEAEWEWKAGFHRW

SEQ ID NO: 13462 - protein, 28 aa, Artificial sequence
  synthetic peptide
SFFPKVLEMTGNIDEAEWEWKAGFHRWN

SEQ ID NO: 13463 - protein, 28 aa, Artificial sequence
  synthetic peptide
FFPKVLEMTGNIDEAEWEWKAGFHRWNN

SEQ ID NO: 13464 - protein, 28 aa, Artificial sequence
  synthetic peptide
FPKVLEMTGNIDEAEWEWKAGFHRWNNY

SEQ ID NO: 13465 - protein, 28 aa, Artificial sequence
  synthetic peptide
PKVLEMTGNIDEAEWEWKAGFHRWNNYM

SEQ ID NO: 13466 - protein, 28 aa, Artificial sequence
  synthetic peptide
KVLEMTGNIDEAEWEWKAGFHRWNNYMM

SEQ ID NO: 13467 - protein, 28 aa, Artificial sequence
  synthetic peptide
VLEMTGNIDEAEWEWKAGFHRWNNYMMD

SEQ ID NO: 13468 - protein, 28 aa, Artificial sequence
  synthetic peptide
LEMTGNIDEAEWEWKAGFHRWNNYMMDW

SEQ ID NO: 13469 - protein, 28 aa, Artificial sequence
  synthetic peptide
EMTGNIDEAEWEWKAGFHRWNNYMMDWK

SEQ ID NO: 13470 - protein, 28 aa, Artificial sequence
  synthetic peptide
MTGNIDEAEWEWKAGFHRWNNYMMDWKN

SEQ ID NO: 13471 - protein, 28 aa, Artificial sequence
  synthetic peptide
TGNIDEAEWEWKAGFHRWNNYMMDWKNQ

SEQ ID NO: 13472 - protein, 28 aa, Artificial sequence
  synthetic peptide
GNIDEAEWEWKAGFHRWNNYMMDWKNQF

SEQ ID NO: 13473 - protein, 28 aa, Artificial sequence
  synthetic peptide
NIDEAEWEWKAGFHRWNNYMMDWKNQFN

SEQ ID NO: 13474 - protein, 28 aa, Artificial sequence
  synthetic peptide
IDEAEWEWKAGFHRWNNYMMDWKNQFND

SEQ ID NO: 13475 - protein, 28 aa, Artificial sequence
  synthetic peptide
DEAEWEWKAGFHRWNNYMMDWKNQFNDY

SEQ ID NO: 13476 - protein, 28 aa, Artificial sequence
  synthetic peptide
EAEWEWKAGFHRWNNYMMDWKNQFNDYT

SEQ ID NO: 13477 - protein, 28 aa, Artificial sequence
  synthetic peptide
AEWEWKAGFHRWNNYMMDWKNQFNDYTS

SEQ ID NO: 13478 - protein, 28 aa, Artificial sequence
  synthetic peptide
EWEWKAGFHRWNNYMMDWKNQFNDYTSK

SEQ ID NO: 13479 - protein, 28 aa, Artificial sequence
  synthetic peptide
WEWKAGFHRWNNYMMDWKNQFNDYTSKK

SEQ ID NO: 13480 - protein, 28 aa, Artificial sequence
  synthetic peptide
EWKAGFHRWNNYMMDWKNQFNDYTSKKE

SEQ ID NO: 13481 - protein, 28 aa, Artificial sequence
  synthetic peptide
WKAGFHRWNNYMMDWKNQFNDYTSKKES

SEQ ID NO: 13482 - protein, 28 aa, Artificial sequence
  synthetic peptide
KAGFHRWNNYMMDWKNQFNDYTSKKESC

SEQ ID NO: 13483 - protein, 28 aa, Artificial sequence
  synthetic peptide
AGFHRWNNYMMDWKNQFNDYTSKKESCV

SEQ ID NO: 13484 - protein, 28 aa, Artificial sequence
  synthetic peptide
GFHRWNNYMMDWKNQFNDYTSKKESCVG

SEQ ID NO: 13485 - protein, 28 aa, Artificial sequence
  synthetic peptide
FHRWNNYMMDWKNQFNDYTSKKESCVGL

SEQ ID NO: 13486 - protein, 29 aa, Artificial sequence
  synthetic peptide
MHSKVTIICIRFLFWFLLLCMLIGKSHTE

SEQ ID NO: 13487 - protein, 29 aa, Artificial sequence
  synthetic peptide
HSKVTIICIRFLFWFLLLCMLIGKSHTED

SEQ ID NO: 13488 - protein, 29 aa, Artificial sequence
  synthetic peptide
SKVTIICIRFLFWFLLLCMLIGKSHTEDD

SEQ ID NO: 13489 - protein, 29 aa, Artificial sequence
  synthetic peptide
KVTIICIRFLFWFLLLCMLIGKSHTEDDI

SEQ ID NO: 13490 - protein, 29 aa, Artificial sequence
  synthetic peptide
VTIICIRFLFWFLLLCMLIGKSHTEDDII

SEQ ID NO: 13491 - protein, 29 aa, Artificial sequence
  synthetic peptide
TIICIRFLFWFLLLCMLIGKSHTEDDIII

SEQ ID NO: 13492 - protein, 29 aa, Artificial sequence
  synthetic peptide
IICIRFLFWFLLLCMLIGKSHTEDDIIIA

SEQ ID NO: 13493 - protein, 29 aa, Artificial sequence
  synthetic peptide
ICIRFLFWFLLLCMLIGKSHTEDDIIIAT

SEQ ID NO: 13494 - protein, 29 aa, Artificial sequence
  synthetic peptide
CIRFLFWFLLLCMLIGKSHTEDDIIIATK

SEQ ID NO: 13495 - protein, 29 aa, Artificial sequence
  synthetic peptide
IRFLFWFLLLCMLIGKSHTEDDIIIATKN

SEQ ID NO: 13496 - protein, 29 aa, Artificial sequence
  synthetic peptide
RFLFWFLLLCMLIGKSHTEDDIIIATKNG

SEQ ID NO: 13497 - protein, 29 aa, Artificial sequence
  synthetic peptide
FLFWFLLLCMLIGKSHTEDDIIIATKNGK

SEQ ID NO: 13498 - protein, 29 aa, Artificial sequence
  synthetic peptide
LFWFLLLCMLIGKSHTEDDIIIATKNGKV

SEQ ID NO: 13499 - protein, 29 aa, Artificial sequence
  synthetic peptide
FWFLLLCMLIGKSHTEDDIIIATKNGKVR

SEQ ID NO: 13500 - protein, 29 aa, Artificial sequence
  synthetic peptide
WFLLLCMLIGKSHTEDDIIIATKNGKVRG

SEQ ID NO: 13501 - protein, 29 aa, Artificial sequence
  synthetic peptide
FLLLCMLIGKSHTEDDIIIATKNGKVRGM

SEQ ID NO: 13502 - protein, 29 aa, Artificial sequence
  synthetic peptide
LLLCMLIGKSHTEDDIIIATKNGKVRGMN

SEQ ID NO: 13503 - protein, 29 aa, Artificial sequence
  synthetic peptide
LLCMLIGKSHTEDDIIIATKNGKVRGMNL

SEQ ID NO: 13504 - protein, 29 aa, Artificial sequence
  synthetic peptide
LCMLIGKSHTEDDIIIATKNGKVRGMNLT

SEQ ID NO: 13505 - protein, 29 aa, Artificial sequence
  synthetic peptide
CMLIGKSHTEDDIIIATKNGKVRGMNLTV

SEQ ID NO: 13506 - protein, 29 aa, Artificial sequence
  synthetic peptide
MLIGKSHTEDDIIIATKNGKVRGMNLTVF

SEQ ID NO: 13507 - protein, 29 aa, Artificial sequence
  synthetic peptide
LIGKSHTEDDIIIATKNGKVRGMNLTVFG

SEQ ID NO: 13508 - protein, 29 aa, Artificial sequence
  synthetic peptide
IGKSHTEDDIIIATKNGKVRGMNLTVFGG

SEQ ID NO: 13509 - protein, 29 aa, Artificial sequence
  synthetic peptide
GKSHTEDDIIIATKNGKVRGMNLTVFGGT

SEQ ID NO: 13510 - protein, 29 aa, Artificial sequence
  synthetic peptide
KSHTEDDIIIATKNGKVRGMNLTVFGGTV

SEQ ID NO: 13511 - protein, 29 aa, Artificial sequence
  synthetic peptide
SHTEDDIIIATKNGKVRGMNLTVFGGTVT

SEQ ID NO: 13512 - protein, 29 aa, Artificial sequence
  synthetic peptide
HTEDDIIIATKNGKVRGMNLTVFGGTVTA

SEQ ID NO: 13513 - protein, 29 aa, Artificial sequence
  synthetic peptide
TEDDIIIATKNGKVRGMNLTVFGGTVTAF

SEQ ID NO: 13514 - protein, 29 aa, Artificial sequence
  synthetic peptide
EDDIIIATKNGKVRGMNLTVFGGTVTAFL

SEQ ID NO: 13515 - protein, 29 aa, Artificial sequence
  synthetic peptide
DDIIIATKNGKVRGMNLTVFGGTVTAFLG

SEQ ID NO: 13516 - protein, 29 aa, Artificial sequence
  synthetic peptide
DIIIATKNGKVRGMNLTVFGGTVTAFLGI

SEQ ID NO: 13517 - protein, 29 aa, Artificial sequence
  synthetic peptide
IIIATKNGKVRGMNLTVFGGTVTAFLGIP

SEQ ID NO: 13518 - protein, 29 aa, Artificial sequence
  synthetic peptide
IIATKNGKVRGMNLTVFGGTVTAFLGIPY

SEQ ID NO: 13519 - protein, 29 aa, Artificial sequence
  synthetic peptide
IATKNGKVRGMNLTVFGGTVTAFLGIPYA

SEQ ID NO: 13520 - protein, 29 aa, Artificial sequence
  synthetic peptide
ATKNGKVRGMNLTVFGGTVTAFLGIPYAQ

SEQ ID NO: 13521 - protein, 29 aa, Artificial sequence
  synthetic peptide
TKNGKVRGMNLTVFGGTVTAFLGIPYAQP

SEQ ID NO: 13522 - protein, 29 aa, Artificial sequence
  synthetic peptide
KNGKVRGMNLTVFGGTVTAFLGIPYAQPP

SEQ ID NO: 13523 - protein, 29 aa, Artificial sequence
  synthetic peptide
NGKVRGMNLTVFGGTVTAFLGIPYAQPPL

SEQ ID NO: 13524 - protein, 29 aa, Artificial sequence
  synthetic peptide
GKVRGMNLTVFGGTVTAFLGIPYAQPPLG

SEQ ID NO: 13525 - protein, 29 aa, Artificial sequence
  synthetic peptide
KVRGMNLTVFGGTVTAFLGIPYAQPPLGR

SEQ ID NO: 13526 - protein, 29 aa, Artificial sequence
  synthetic peptide
VRGMNLTVFGGTVTAFLGIPYAQPPLGRL

SEQ ID NO: 13527 - protein, 29 aa, Artificial sequence
  synthetic peptide
RGMNLTVFGGTVTAFLGIPYAQPPLGRLR

SEQ ID NO: 13528 - protein, 29 aa, Artificial sequence
  synthetic peptide
GMNLTVFGGTVTAFLGIPYAQPPLGRLRF

SEQ ID NO: 13529 - protein, 29 aa, Artificial sequence
  synthetic peptide
MNLTVFGGTVTAFLGIPYAQPPLGRLRFK

SEQ ID NO: 13530 - protein, 29 aa, Artificial sequence
  synthetic peptide
NLTVFGGTVTAFLGIPYAQPPLGRLRFKK

SEQ ID NO: 13531 - protein, 29 aa, Artificial sequence
  synthetic peptide
LTVFGGTVTAFLGIPYAQPPLGRLRFKKP

SEQ ID NO: 13532 - protein, 29 aa, Artificial sequence
  synthetic peptide
TVFGGTVTAFLGIPYAQPPLGRLRFKKPQ

SEQ ID NO: 13533 - protein, 29 aa, Artificial sequence
  synthetic peptide
VFGGTVTAFLGIPYAQPPLGRLRFKKPQS

SEQ ID NO: 13534 - protein, 29 aa, Artificial sequence
  synthetic peptide
FGGTVTAFLGIPYAQPPLGRLRFKKPQSL

SEQ ID NO: 13535 - protein, 29 aa, Artificial sequence
  synthetic peptide
GGTVTAFLGIPYAQPPLGRLRFKKPQSLT

SEQ ID NO: 13536 - protein, 29 aa, Artificial sequence
  synthetic peptide
GTVTAFLGIPYAQPPLGRLRFKKPQSLTK

SEQ ID NO: 13537 - protein, 29 aa, Artificial sequence
  synthetic peptide
TVTAFLGIPYAQPPLGRLRFKKPQSLTKW

SEQ ID NO: 13538 - protein, 29 aa, Artificial sequence
  synthetic peptide
VTAFLGIPYAQPPLGRLRFKKPQSLTKWS

SEQ ID NO: 13539 - protein, 29 aa, Artificial sequence
  synthetic peptide
TAFLGIPYAQPPLGRLRFKKPQSLTKWSD

SEQ ID NO: 13540 - protein, 29 aa, Artificial sequence
  synthetic peptide
AFLGIPYAQPPLGRLRFKKPQSLTKWSDI

SEQ ID NO: 13541 - protein, 29 aa, Artificial sequence
  synthetic peptide
FLGIPYAQPPLGRLRFKKPQSLTKWSDIW

SEQ ID NO: 13542 - protein, 29 aa, Artificial sequence
  synthetic peptide
LGIPYAQPPLGRLRFKKPQSLTKWSDIWN

SEQ ID NO: 13543 - protein, 29 aa, Artificial sequence
  synthetic peptide
GIPYAQPPLGRLRFKKPQSLTKWSDIWNA

SEQ ID NO: 13544 - protein, 29 aa, Artificial sequence
  synthetic peptide
IPYAQPPLGRLRFKKPQSLTKWSDIWNAT

SEQ ID NO: 13545 - protein, 29 aa, Artificial sequence
  synthetic peptide
PYAQPPLGRLRFKKPQSLTKWSDIWNATK

SEQ ID NO: 13546 - protein, 29 aa, Artificial sequence
  synthetic peptide
YAQPPLGRLRFKKPQSLTKWSDIWNATKY

SEQ ID NO: 13547 - protein, 29 aa, Artificial sequence
  synthetic peptide
AQPPLGRLRFKKPQSLTKWSDIWNATKYA

SEQ ID NO: 13548 - protein, 29 aa, Artificial sequence
  synthetic peptide
QPPLGRLRFKKPQSLTKWSDIWNATKYAN

SEQ ID NO: 13549 - protein, 29 aa, Artificial sequence
  synthetic peptide
PPLGRLRFKKPQSLTKWSDIWNATKYANS

SEQ ID NO: 13550 - protein, 29 aa, Artificial sequence
  synthetic peptide
PLGRLRFKKPQSLTKWSDIWNATKYANSC

SEQ ID NO: 13551 - protein, 29 aa, Artificial sequence
  synthetic peptide
LGRLRFKKPQSLTKWSDIWNATKYANSCC

SEQ ID NO: 13552 - protein, 29 aa, Artificial sequence
  synthetic peptide
GRLRFKKPQSLTKWSDIWNATKYANSCCQ

SEQ ID NO: 13553 - protein, 29 aa, Artificial sequence
  synthetic peptide
RLRFKKPQSLTKWSDIWNATKYANSCCQN

SEQ ID NO: 13554 - protein, 29 aa, Artificial sequence
  synthetic peptide
LRFKKPQSLTKWSDIWNATKYANSCCQNI

SEQ ID NO: 13555 - protein, 29 aa, Artificial sequence
  synthetic peptide
RFKKPQSLTKWSDIWNATKYANSCCQNID

SEQ ID NO: 13556 - protein, 29 aa, Artificial sequence
  synthetic peptide
FKKPQSLTKWSDIWNATKYANSCCQNIDQ

SEQ ID NO: 13557 - protein, 29 aa, Artificial sequence
  synthetic peptide
KKPQSLTKWSDIWNATKYANSCCQNIDQS

SEQ ID NO: 13558 - protein, 29 aa, Artificial sequence
  synthetic peptide
KPQSLTKWSDIWNATKYANSCCQNIDQSF

SEQ ID NO: 13559 - protein, 29 aa, Artificial sequence
  synthetic peptide
PQSLTKWSDIWNATKYANSCCQNIDQSFP

SEQ ID NO: 13560 - protein, 29 aa, Artificial sequence
  synthetic peptide
QSLTKWSDIWNATKYANSCCQNIDQSFPG

SEQ ID NO: 13561 - protein, 29 aa, Artificial sequence
  synthetic peptide
SLTKWSDIWNATKYANSCCQNIDQSFPGF

SEQ ID NO: 13562 - protein, 29 aa, Artificial sequence
  synthetic peptide
LTKWSDIWNATKYANSCCQNIDQSFPGFH

SEQ ID NO: 13563 - protein, 29 aa, Artificial sequence
  synthetic peptide
TKWSDIWNATKYANSCCQNIDQSFPGFHG

SEQ ID NO: 13564 - protein, 29 aa, Artificial sequence
  synthetic peptide
KWSDIWNATKYANSCCQNIDQSFPGFHGS

SEQ ID NO: 13565 - protein, 29 aa, Artificial sequence
  synthetic peptide
WSDIWNATKYANSCCQNIDQSFPGFHGSE

SEQ ID NO: 13566 - protein, 29 aa, Artificial sequence
  synthetic peptide
SDIWNATKYANSCCQNIDQSFPGFHGSEM

SEQ ID NO: 13567 - protein, 29 aa, Artificial sequence
  synthetic peptide
DIWNATKYANSCCQNIDQSFPGFHGSEMW

SEQ ID NO: 13568 - protein, 29 aa, Artificial sequence
  synthetic peptide
IWNATKYANSCCQNIDQSFPGFHGSEMWN

SEQ ID NO: 13569 - protein, 29 aa, Artificial sequence
  synthetic peptide
WNATKYANSCCQNIDQSFPGFHGSEMWNP

SEQ ID NO: 13570 - protein, 29 aa, Artificial sequence
  synthetic peptide
NATKYANSCCQNIDQSFPGFHGSEMWNPN

SEQ ID NO: 13571 - protein, 29 aa, Artificial sequence
  synthetic peptide
ATKYANSCCQNIDQSFPGFHGSEMWNPNT

SEQ ID NO: 13572 - protein, 29 aa, Artificial sequence
  synthetic peptide
TKYANSCCQNIDQSFPGFHGSEMWNPNTD

SEQ ID NO: 13573 - protein, 29 aa, Artificial sequence
  synthetic peptide
KYANSCCQNIDQSFPGFHGSEMWNPNTDL

SEQ ID NO: 13574 - protein, 29 aa, Artificial sequence
  synthetic peptide
YANSCCQNIDQSFPGFHGSEMWNPNTDLS

SEQ ID NO: 13575 - protein, 29 aa, Artificial sequence
  synthetic peptide
ANSCCQNIDQSFPGFHGSEMWNPNTDLSE

SEQ ID NO: 13576 - protein, 29 aa, Artificial sequence
  synthetic peptide
NSCCQNIDQSFPGFHGSEMWNPNTDLSED

SEQ ID NO: 13577 - protein, 29 aa, Artificial sequence
  synthetic peptide
SCCQNIDQSFPGFHGSEMWNPNTDLSEDC

SEQ ID NO: 13578 - protein, 29 aa, Artificial sequence
  synthetic peptide
CCQNIDQSFPGFHGSEMWNPNTDLSEDCL

SEQ ID NO: 13579 - protein, 29 aa, Artificial sequence
  synthetic peptide
CQNIDQSFPGFHGSEMWNPNTDLSEDCLY

SEQ ID NO: 13580 - protein, 29 aa, Artificial sequence
  synthetic peptide
QNIDQSFPGFHGSEMWNPNTDLSEDCLYL

SEQ ID NO: 13581 - protein, 29 aa, Artificial sequence
  synthetic peptide
NIDQSFPGFHGSEMWNPNTDLSEDCLYLN

SEQ ID NO: 13582 - protein, 29 aa, Artificial sequence
  synthetic peptide
IDQSFPGFHGSEMWNPNTDLSEDCLYLNV

SEQ ID NO: 13583 - protein, 29 aa, Artificial sequence
  synthetic peptide
DQSFPGFHGSEMWNPNTDLSEDCLYLNVW

SEQ ID NO: 13584 - protein, 29 aa, Artificial sequence
  synthetic peptide
QSFPGFHGSEMWNPNTDLSEDCLYLNVWI

SEQ ID NO: 13585 - protein, 29 aa, Artificial sequence
  synthetic peptide
SFPGFHGSEMWNPNTDLSEDCLYLNVWIP

SEQ ID NO: 13586 - protein, 29 aa, Artificial sequence
  synthetic peptide
FPGFHGSEMWNPNTDLSEDCLYLNVWIPA

SEQ ID NO: 13587 - protein, 29 aa, Artificial sequence
  synthetic peptide
PGFHGSEMWNPNTDLSEDCLYLNVWIPAP

SEQ ID NO: 13588 - protein, 29 aa, Artificial sequence
  synthetic peptide
GFHGSEMWNPNTDLSEDCLYLNVWIPAPK

SEQ ID NO: 13589 - protein, 29 aa, Artificial sequence
  synthetic peptide
FHGSEMWNPNTDLSEDCLYLNVWIPAPKP

SEQ ID NO: 13590 - protein, 29 aa, Artificial sequence
  synthetic peptide
HGSEMWNPNTDLSEDCLYLNVWIPAPKPK

SEQ ID NO: 13591 - protein, 29 aa, Artificial sequence
  synthetic peptide
GSEMWNPNTDLSEDCLYLNVWIPAPKPKN

SEQ ID NO: 13592 - protein, 29 aa, Artificial sequence
  synthetic peptide
SEMWNPNTDLSEDCLYLNVWIPAPKPKNA

SEQ ID NO: 13593 - protein, 29 aa, Artificial sequence
  synthetic peptide
EMWNPNTDLSEDCLYLNVWIPAPKPKNAT

SEQ ID NO: 13594 - protein, 29 aa, Artificial sequence
  synthetic peptide
MWNPNTDLSEDCLYLNVWIPAPKPKNATV

SEQ ID NO: 13595 - protein, 29 aa, Artificial sequence
  synthetic peptide
WNPNTDLSEDCLYLNVWIPAPKPKNATVL

SEQ ID NO: 13596 - protein, 29 aa, Artificial sequence
  synthetic peptide
NPNTDLSEDCLYLNVWIPAPKPKNATVLI

SEQ ID NO: 13597 - protein, 29 aa, Artificial sequence
  synthetic peptide
PNTDLSEDCLYLNVWIPAPKPKNATVLIW

SEQ ID NO: 13598 - protein, 29 aa, Artificial sequence
  synthetic peptide
NTDLSEDCLYLNVWIPAPKPKNATVLIWI

SEQ ID NO: 13599 - protein, 29 aa, Artificial sequence
  synthetic peptide
TDLSEDCLYLNVWIPAPKPKNATVLIWIY

SEQ ID NO: 13600 - protein, 29 aa, Artificial sequence
  synthetic peptide
DLSEDCLYLNVWIPAPKPKNATVLIWIYG

SEQ ID NO: 13601 - protein, 29 aa, Artificial sequence
  synthetic peptide
LSEDCLYLNVWIPAPKPKNATVLIWIYGG

SEQ ID NO: 13602 - protein, 29 aa, Artificial sequence
  synthetic peptide
SEDCLYLNVWIPAPKPKNATVLIWIYGGG

SEQ ID NO: 13603 - protein, 29 aa, Artificial sequence
  synthetic peptide
EDCLYLNVWIPAPKPKNATVLIWIYGGGF

SEQ ID NO: 13604 - protein, 29 aa, Artificial sequence
  synthetic peptide
DCLYLNVWIPAPKPKNATVLIWIYGGGFQ

SEQ ID NO: 13605 - protein, 29 aa, Artificial sequence
  synthetic peptide
CLYLNVWIPAPKPKNATVLIWIYGGGFQT

SEQ ID NO: 13606 - protein, 29 aa, Artificial sequence
  synthetic peptide
LYLNVWIPAPKPKNATVLIWIYGGGFQTG

SEQ ID NO: 13607 - protein, 29 aa, Artificial sequence
  synthetic peptide
YLNVWIPAPKPKNATVLIWIYGGGFQTGT

SEQ ID NO: 13608 - protein, 29 aa, Artificial sequence
  synthetic peptide
LNVWIPAPKPKNATVLIWIYGGGFQTGTS

SEQ ID NO: 13609 - protein, 29 aa, Artificial sequence
  synthetic peptide
NVWIPAPKPKNATVLIWIYGGGFQTGTSS

SEQ ID NO: 13610 - protein, 29 aa, Artificial sequence
  synthetic peptide
VWIPAPKPKNATVLIWIYGGGFQTGTSSL

SEQ ID NO: 13611 - protein, 29 aa, Artificial sequence
  synthetic peptide
WIPAPKPKNATVLIWIYGGGFQTGTSSLH

SEQ ID NO: 13612 - protein, 29 aa, Artificial sequence
  synthetic peptide
IPAPKPKNATVLIWIYGGGFQTGTSSLHV

SEQ ID NO: 13613 - protein, 29 aa, Artificial sequence
  synthetic peptide
PAPKPKNATVLIWIYGGGFQTGTSSLHVY

SEQ ID NO: 13614 - protein, 29 aa, Artificial sequence
  synthetic peptide
APKPKNATVLIWIYGGGFQTGTSSLHVYD

SEQ ID NO: 13615 - protein, 29 aa, Artificial sequence
  synthetic peptide
PKPKNATVLIWIYGGGFQTGTSSLHVYDG

SEQ ID NO: 13616 - protein, 29 aa, Artificial sequence
  synthetic peptide
KPKNATVLIWIYGGGFQTGTSSLHVYDGK

SEQ ID NO: 13617 - protein, 29 aa, Artificial sequence
  synthetic peptide
PKNATVLIWIYGGGFQTGTSSLHVYDGKF

SEQ ID NO: 13618 - protein, 29 aa, Artificial sequence
  synthetic peptide
KNATVLIWIYGGGFQTGTSSLHVYDGKFL

SEQ ID NO: 13619 - protein, 29 aa, Artificial sequence
  synthetic peptide
NATVLIWIYGGGFQTGTSSLHVYDGKFLA

SEQ ID NO: 13620 - protein, 29 aa, Artificial sequence
  synthetic peptide
ATVLIWIYGGGFQTGTSSLHVYDGKFLAR

SEQ ID NO: 13621 - protein, 29 aa, Artificial sequence
  synthetic peptide
TVLIWIYGGGFQTGTSSLHVYDGKFLARV

SEQ ID NO: 13622 - protein, 29 aa, Artificial sequence
  synthetic peptide
VLIWIYGGGFQTGTSSLHVYDGKFLARVE

SEQ ID NO: 13623 - protein, 29 aa, Artificial sequence
  synthetic peptide
LIWIYGGGFQTGTSSLHVYDGKFLARVER

SEQ ID NO: 13624 - protein, 29 aa, Artificial sequence
  synthetic peptide
IWIYGGGFQTGTSSLHVYDGKFLARVERV

SEQ ID NO: 13625 - protein, 29 aa, Artificial sequence
  synthetic peptide
WIYGGGFQTGTSSLHVYDGKFLARVERVI

SEQ ID NO: 13626 - protein, 29 aa, Artificial sequence
  synthetic peptide
IYGGGFQTGTSSLHVYDGKFLARVERVIV

SEQ ID NO: 13627 - protein, 29 aa, Artificial sequence
  synthetic peptide
YGGGFQTGTSSLHVYDGKFLARVERVIVV

SEQ ID NO: 13628 - protein, 29 aa, Artificial sequence
  synthetic peptide
GGGFQTGTSSLHVYDGKFLARVERVIVVS

SEQ ID NO: 13629 - protein, 29 aa, Artificial sequence
  synthetic peptide
GGFQTGTSSLHVYDGKFLARVERVIVVSM

SEQ ID NO: 13630 - protein, 29 aa, Artificial sequence
  synthetic peptide
GFQTGTSSLHVYDGKFLARVERVIVVSMN

SEQ ID NO: 13631 - protein, 29 aa, Artificial sequence
  synthetic peptide
FQTGTSSLHVYDGKFLARVERVIVVSMNY

SEQ ID NO: 13632 - protein, 29 aa, Artificial sequence
  synthetic peptide
QTGTSSLHVYDGKFLARVERVIVVSMNYR

SEQ ID NO: 13633 - protein, 29 aa, Artificial sequence
  synthetic peptide
TGTSSLHVYDGKFLARVERVIVVSMNYRV

SEQ ID NO: 13634 - protein, 29 aa, Artificial sequence
  synthetic peptide
GTSSLHVYDGKFLARVERVIVVSMNYRVG

SEQ ID NO: 13635 - protein, 29 aa, Artificial sequence
  synthetic peptide
TSSLHVYDGKFLARVERVIVVSMNYRVGA

SEQ ID NO: 13636 - protein, 29 aa, Artificial sequence
  synthetic peptide
SSLHVYDGKFLARVERVIVVSMNYRVGAL

SEQ ID NO: 13637 - protein, 29 aa, Artificial sequence
  synthetic peptide
SLHVYDGKFLARVERVIVVSMNYRVGALG

SEQ ID NO: 13638 - protein, 29 aa, Artificial sequence
  synthetic peptide
LHVYDGKFLARVERVIVVSMNYRVGALGF

SEQ ID NO: 13639 - protein, 29 aa, Artificial sequence
  synthetic peptide
HVYDGKFLARVERVIVVSMNYRVGALGFL

SEQ ID NO: 13640 - protein, 29 aa, Artificial sequence
  synthetic peptide
VYDGKFLARVERVIVVSMNYRVGALGFLA

SEQ ID NO: 13641 - protein, 29 aa, Artificial sequence
  synthetic peptide
YDGKFLARVERVIVVSMNYRVGALGFLAL

SEQ ID NO: 13642 - protein, 29 aa, Artificial sequence
  synthetic peptide
DGKFLARVERVIVVSMNYRVGALGFLALP

SEQ ID NO: 13643 - protein, 29 aa, Artificial sequence
  synthetic peptide
GKFLARVERVIVVSMNYRVGALGFLALPG

SEQ ID NO: 13644 - protein, 29 aa, Artificial sequence
  synthetic peptide
KFLARVERVIVVSMNYRVGALGFLALPGN

SEQ ID NO: 13645 - protein, 29 aa, Artificial sequence
  synthetic peptide
FLARVERVIVVSMNYRVGALGFLALPGNP

SEQ ID NO: 13646 - protein, 29 aa, Artificial sequence
  synthetic peptide
LARVERVIVVSMNYRVGALGFLALPGNPE

SEQ ID NO: 13647 - protein, 29 aa, Artificial sequence
  synthetic peptide
ARVERVIVVSMNYRVGALGFLALPGNPEA

SEQ ID NO: 13648 - protein, 29 aa, Artificial sequence
  synthetic peptide
RVERVIVVSMNYRVGALGFLALPGNPEAP

SEQ ID NO: 13649 - protein, 29 aa, Artificial sequence
  synthetic peptide
VERVIVVSMNYRVGALGFLALPGNPEAPG

SEQ ID NO: 13650 - protein, 29 aa, Artificial sequence
  synthetic peptide
ERVIVVSMNYRVGALGFLALPGNPEAPGN

SEQ ID NO: 13651 - protein, 29 aa, Artificial sequence
  synthetic peptide
RVIVVSMNYRVGALGFLALPGNPEAPGNM

SEQ ID NO: 13652 - protein, 29 aa, Artificial sequence
  synthetic peptide
VIVVSMNYRVGALGFLALPGNPEAPGNMG

SEQ ID NO: 13653 - protein, 29 aa, Artificial sequence
  synthetic peptide
IVVSMNYRVGALGFLALPGNPEAPGNMGL

SEQ ID NO: 13654 - protein, 29 aa, Artificial sequence
  synthetic peptide
VVSMNYRVGALGFLALPGNPEAPGNMGLF

SEQ ID NO: 13655 - protein, 29 aa, Artificial sequence
  synthetic peptide
VSMNYRVGALGFLALPGNPEAPGNMGLFD

SEQ ID NO: 13656 - protein, 29 aa, Artificial sequence
  synthetic peptide
SMNYRVGALGFLALPGNPEAPGNMGLFDQ

SEQ ID NO: 13657 - protein, 29 aa, Artificial sequence
  synthetic peptide
MNYRVGALGFLALPGNPEAPGNMGLFDQQ

SEQ ID NO: 13658 - protein, 29 aa, Artificial sequence
  synthetic peptide
NYRVGALGFLALPGNPEAPGNMGLFDQQL

SEQ ID NO: 13659 - protein, 29 aa, Artificial sequence
  synthetic peptide
YRVGALGFLALPGNPEAPGNMGLFDQQLA

SEQ ID NO: 13660 - protein, 29 aa, Artificial sequence
  synthetic peptide
RVGALGFLALPGNPEAPGNMGLFDQQLAL

SEQ ID NO: 13661 - protein, 29 aa, Artificial sequence
  synthetic peptide
VGALGFLALPGNPEAPGNMGLFDQQLALQ

SEQ ID NO: 13662 - protein, 29 aa, Artificial sequence
  synthetic peptide
GALGFLALPGNPEAPGNMGLFDQQLALQW

SEQ ID NO: 13663 - protein, 29 aa, Artificial sequence
  synthetic peptide
ALGFLALPGNPEAPGNMGLFDQQLALQWV

SEQ ID NO: 13664 - protein, 29 aa, Artificial sequence
  synthetic peptide
LGFLALPGNPEAPGNMGLFDQQLALQWVQ

SEQ ID NO: 13665 - protein, 29 aa, Artificial sequence
  synthetic peptide
GFLALPGNPEAPGNMGLFDQQLALQWVQK

SEQ ID NO: 13666 - protein, 29 aa, Artificial sequence
  synthetic peptide
FLALPGNPEAPGNMGLFDQQLALQWVQKN

SEQ ID NO: 13667 - protein, 29 aa, Artificial sequence
  synthetic peptide
LALPGNPEAPGNMGLFDQQLALQWVQKNI

SEQ ID NO: 13668 - protein, 29 aa, Artificial sequence
  synthetic peptide
ALPGNPEAPGNMGLFDQQLALQWVQKNIA

SEQ ID NO: 13669 - protein, 29 aa, Artificial sequence
  synthetic peptide
LPGNPEAPGNMGLFDQQLALQWVQKNIAA

SEQ ID NO: 13670 - protein, 29 aa, Artificial sequence
  synthetic peptide
PGNPEAPGNMGLFDQQLALQWVQKNIAAF

SEQ ID NO: 13671 - protein, 29 aa, Artificial sequence
  synthetic peptide
GNPEAPGNMGLFDQQLALQWVQKNIAAFG

SEQ ID NO: 13672 - protein, 29 aa, Artificial sequence
  synthetic peptide
NPEAPGNMGLFDQQLALQWVQKNIAAFGG

SEQ ID NO: 13673 - protein, 29 aa, Artificial sequence
  synthetic peptide
PEAPGNMGLFDQQLALQWVQKNIAAFGGN

SEQ ID NO: 13674 - protein, 29 aa, Artificial sequence
  synthetic peptide
EAPGNMGLFDQQLALQWVQKNIAAFGGNP

SEQ ID NO: 13675 - protein, 29 aa, Artificial sequence
  synthetic peptide
APGNMGLFDQQLALQWVQKNIAAFGGNPK

SEQ ID NO: 13676 - protein, 29 aa, Artificial sequence
  synthetic peptide
PGNMGLFDQQLALQWVQKNIAAFGGNPKS

SEQ ID NO: 13677 - protein, 29 aa, Artificial sequence
  synthetic peptide
GNMGLFDQQLALQWVQKNIAAFGGNPKSV

SEQ ID NO: 13678 - protein, 29 aa, Artificial sequence
  synthetic peptide
NMGLFDQQLALQWVQKNIAAFGGNPKSVT

SEQ ID NO: 13679 - protein, 29 aa, Artificial sequence
  synthetic peptide
MGLFDQQLALQWVQKNIAAFGGNPKSVTL

SEQ ID NO: 13680 - protein, 29 aa, Artificial sequence
  synthetic peptide
GLFDQQLALQWVQKNIAAFGGNPKSVTLF

SEQ ID NO: 13681 - protein, 29 aa, Artificial sequence
  synthetic peptide
LFDQQLALQWVQKNIAAFGGNPKSVTLFG

SEQ ID NO: 13682 - protein, 29 aa, Artificial sequence
  synthetic peptide
FDQQLALQWVQKNIAAFGGNPKSVTLFGE

SEQ ID NO: 13683 - protein, 29 aa, Artificial sequence
  synthetic peptide
DQQLALQWVQKNIAAFGGNPKSVTLFGES

SEQ ID NO: 13684 - protein, 29 aa, Artificial sequence
  synthetic peptide
QQLALQWVQKNIAAFGGNPKSVTLFGESA

SEQ ID NO: 13685 - protein, 29 aa, Artificial sequence
  synthetic peptide
QLALQWVQKNIAAFGGNPKSVTLFGESAG

SEQ ID NO: 13686 - protein, 29 aa, Artificial sequence
  synthetic peptide
LALQWVQKNIAAFGGNPKSVTLFGESAGA

SEQ ID NO: 13687 - protein, 29 aa, Artificial sequence
  synthetic peptide
ALQWVQKNIAAFGGNPKSVTLFGESAGAA

SEQ ID NO: 13688 - protein, 29 aa, Artificial sequence
  synthetic peptide
LQWVQKNIAAFGGNPKSVTLFGESAGAAS

SEQ ID NO: 13689 - protein, 29 aa, Artificial sequence
  synthetic peptide
QWVQKNIAAFGGNPKSVTLFGESAGAASV

SEQ ID NO: 13690 - protein, 29 aa, Artificial sequence
  synthetic peptide
WVQKNIAAFGGNPKSVTLFGESAGAASVS

SEQ ID NO: 13691 - protein, 29 aa, Artificial sequence
  synthetic peptide
VQKNIAAFGGNPKSVTLFGESAGAASVSL

SEQ ID NO: 13692 - protein, 29 aa, Artificial sequence
  synthetic peptide
QKNIAAFGGNPKSVTLFGESAGAASVSLH

SEQ ID NO: 13693 - protein, 29 aa, Artificial sequence
  synthetic peptide
KNIAAFGGNPKSVTLFGESAGAASVSLHL

SEQ ID NO: 13694 - protein, 29 aa, Artificial sequence
  synthetic peptide
NIAAFGGNPKSVTLFGESAGAASVSLHLL

SEQ ID NO: 13695 - protein, 29 aa, Artificial sequence
  synthetic peptide
IAAFGGNPKSVTLFGESAGAASVSLHLLS

SEQ ID NO: 13696 - protein, 29 aa, Artificial sequence
  synthetic peptide
AAFGGNPKSVTLFGESAGAASVSLHLLSP

SEQ ID NO: 13697 - protein, 29 aa, Artificial sequence
  synthetic peptide
AFGGNPKSVTLFGESAGAASVSLHLLSPG

SEQ ID NO: 13698 - protein, 29 aa, Artificial sequence
  synthetic peptide
FGGNPKSVTLFGESAGAASVSLHLLSPGS

SEQ ID NO: 13699 - protein, 29 aa, Artificial sequence
  synthetic peptide
GGNPKSVTLFGESAGAASVSLHLLSPGSH

SEQ ID NO: 13700 - protein, 29 aa, Artificial sequence
  synthetic peptide
GNPKSVTLFGESAGAASVSLHLLSPGSHS

SEQ ID NO: 13701 - protein, 29 aa, Artificial sequence
  synthetic peptide
NPKSVTLFGESAGAASVSLHLLSPGSHSL

SEQ ID NO: 13702 - protein, 29 aa, Artificial sequence
  synthetic peptide
PKSVTLFGESAGAASVSLHLLSPGSHSLF

SEQ ID NO: 13703 - protein, 29 aa, Artificial sequence
  synthetic peptide
KSVTLFGESAGAASVSLHLLSPGSHSLFT

SEQ ID NO: 13704 - protein, 29 aa, Artificial sequence
  synthetic peptide
SVTLFGESAGAASVSLHLLSPGSHSLFTR

SEQ ID NO: 13705 - protein, 29 aa, Artificial sequence
  synthetic peptide
VTLFGESAGAASVSLHLLSPGSHSLFTRA

SEQ ID NO: 13706 - protein, 29 aa, Artificial sequence
  synthetic peptide
TLFGESAGAASVSLHLLSPGSHSLFTRAI

SEQ ID NO: 13707 - protein, 29 aa, Artificial sequence
  synthetic peptide
LFGESAGAASVSLHLLSPGSHSLFTRAIL

SEQ ID NO: 13708 - protein, 29 aa, Artificial sequence
  synthetic peptide
FGESAGAASVSLHLLSPGSHSLFTRAILQ

SEQ ID NO: 13709 - protein, 29 aa, Artificial sequence
  synthetic peptide
GESAGAASVSLHLLSPGSHSLFTRAILQS

SEQ ID NO: 13710 - protein, 29 aa, Artificial sequence
  synthetic peptide
ESAGAASVSLHLLSPGSHSLFTRAILQSG

SEQ ID NO: 13711 - protein, 29 aa, Artificial sequence
  synthetic peptide
SAGAASVSLHLLSPGSHSLFTRAILQSGS

SEQ ID NO: 13712 - protein, 29 aa, Artificial sequence
  synthetic peptide
AGAASVSLHLLSPGSHSLFTRAILQSGSF

SEQ ID NO: 13713 - protein, 29 aa, Artificial sequence
  synthetic peptide
GAASVSLHLLSPGSHSLFTRAILQSGSFN

SEQ ID NO: 13714 - protein, 29 aa, Artificial sequence
  synthetic peptide
AASVSLHLLSPGSHSLFTRAILQSGSFNA

SEQ ID NO: 13715 - protein, 29 aa, Artificial sequence
  synthetic peptide
ASVSLHLLSPGSHSLFTRAILQSGSFNAP

SEQ ID NO: 13716 - protein, 29 aa, Artificial sequence
  synthetic peptide
SVSLHLLSPGSHSLFTRAILQSGSFNAPW

SEQ ID NO: 13717 - protein, 29 aa, Artificial sequence
  synthetic peptide
VSLHLLSPGSHSLFTRAILQSGSFNAPWA

SEQ ID NO: 13718 - protein, 29 aa, Artificial sequence
  synthetic peptide
SLHLLSPGSHSLFTRAILQSGSFNAPWAV

SEQ ID NO: 13719 - protein, 29 aa, Artificial sequence
  synthetic peptide
LHLLSPGSHSLFTRAILQSGSFNAPWAVT

SEQ ID NO: 13720 - protein, 29 aa, Artificial sequence
  synthetic peptide
HLLSPGSHSLFTRAILQSGSFNAPWAVTS

SEQ ID NO: 13721 - protein, 29 aa, Artificial sequence
  synthetic peptide
LLSPGSHSLFTRAILQSGSFNAPWAVTSL

SEQ ID NO: 13722 - protein, 29 aa, Artificial sequence
  synthetic peptide
LSPGSHSLFTRAILQSGSFNAPWAVTSLY

SEQ ID NO: 13723 - protein, 29 aa, Artificial sequence
  synthetic peptide
SPGSHSLFTRAILQSGSFNAPWAVTSLYE

SEQ ID NO: 13724 - protein, 29 aa, Artificial sequence
  synthetic peptide
PGSHSLFTRAILQSGSFNAPWAVTSLYEA

SEQ ID NO: 13725 - protein, 29 aa, Artificial sequence
  synthetic peptide
GSHSLFTRAILQSGSFNAPWAVTSLYEAR

SEQ ID NO: 13726 - protein, 29 aa, Artificial sequence
  synthetic peptide
SHSLFTRAILQSGSFNAPWAVTSLYEARN

SEQ ID NO: 13727 - protein, 29 aa, Artificial sequence
  synthetic peptide
HSLFTRAILQSGSFNAPWAVTSLYEARNR

SEQ ID NO: 13728 - protein, 29 aa, Artificial sequence
  synthetic peptide
SLFTRAILQSGSFNAPWAVTSLYEARNRT

SEQ ID NO: 13729 - protein, 29 aa, Artificial sequence
  synthetic peptide
LFTRAILQSGSFNAPWAVTSLYEARNRTL

SEQ ID NO: 13730 - protein, 29 aa, Artificial sequence
  synthetic peptide
FTRAILQSGSFNAPWAVTSLYEARNRTLN

SEQ ID NO: 13731 - protein, 29 aa, Artificial sequence
  synthetic peptide
TRAILQSGSFNAPWAVTSLYEARNRTLNL

SEQ ID NO: 13732 - protein, 29 aa, Artificial sequence
  synthetic peptide
RAILQSGSFNAPWAVTSLYEARNRTLNLA

SEQ ID NO: 13733 - protein, 29 aa, Artificial sequence
  synthetic peptide
AILQSGSFNAPWAVTSLYEARNRTLNLAK

SEQ ID NO: 13734 - protein, 29 aa, Artificial sequence
  synthetic peptide
ILQSGSFNAPWAVTSLYEARNRTLNLAKL

SEQ ID NO: 13735 - protein, 29 aa, Artificial sequence
  synthetic peptide
LQSGSFNAPWAVTSLYEARNRTLNLAKLT

SEQ ID NO: 13736 - protein, 29 aa, Artificial sequence
  synthetic peptide
QSGSFNAPWAVTSLYEARNRTLNLAKLTG

SEQ ID NO: 13737 - protein, 29 aa, Artificial sequence
  synthetic peptide
SGSFNAPWAVTSLYEARNRTLNLAKLTGC

SEQ ID NO: 13738 - protein, 29 aa, Artificial sequence
  synthetic peptide
GSFNAPWAVTSLYEARNRTLNLAKLTGCS

SEQ ID NO: 13739 - protein, 29 aa, Artificial sequence
  synthetic peptide
SFNAPWAVTSLYEARNRTLNLAKLTGCSR

SEQ ID NO: 13740 - protein, 29 aa, Artificial sequence
  synthetic peptide
FNAPWAVTSLYEARNRTLNLAKLTGCSRE

SEQ ID NO: 13741 - protein, 29 aa, Artificial sequence
  synthetic peptide
NAPWAVTSLYEARNRTLNLAKLTGCSREN

SEQ ID NO: 13742 - protein, 29 aa, Artificial sequence
  synthetic peptide
APWAVTSLYEARNRTLNLAKLTGCSRENE

SEQ ID NO: 13743 - protein, 29 aa, Artificial sequence
  synthetic peptide
PWAVTSLYEARNRTLNLAKLTGCSRENET

SEQ ID NO: 13744 - protein, 29 aa, Artificial sequence
  synthetic peptide
WAVTSLYEARNRTLNLAKLTGCSRENETE

SEQ ID NO: 13745 - protein, 29 aa, Artificial sequence
  synthetic peptide
AVTSLYEARNRTLNLAKLTGCSRENETEI

SEQ ID NO: 13746 - protein, 29 aa, Artificial sequence
  synthetic peptide
VTSLYEARNRTLNLAKLTGCSRENETEII

SEQ ID NO: 13747 - protein, 29 aa, Artificial sequence
  synthetic peptide
TSLYEARNRTLNLAKLTGCSRENETEIIK

SEQ ID NO: 13748 - protein, 29 aa, Artificial sequence
  synthetic peptide
SLYEARNRTLNLAKLTGCSRENETEIIKC

SEQ ID NO: 13749 - protein, 29 aa, Artificial sequence
  synthetic peptide
LYEARNRTLNLAKLTGCSRENETEIIKCL

SEQ ID NO: 13750 - protein, 29 aa, Artificial sequence
  synthetic peptide
YEARNRTLNLAKLTGCSRENETEIIKCLR

SEQ ID NO: 13751 - protein, 29 aa, Artificial sequence
  synthetic peptide
EARNRTLNLAKLTGCSRENETEIIKCLRN

SEQ ID NO: 13752 - protein, 29 aa, Artificial sequence
  synthetic peptide
ARNRTLNLAKLTGCSRENETEIIKCLRNK

SEQ ID NO: 13753 - protein, 29 aa, Artificial sequence
  synthetic peptide
RNRTLNLAKLTGCSRENETEIIKCLRNKD

SEQ ID NO: 13754 - protein, 29 aa, Artificial sequence
  synthetic peptide
NRTLNLAKLTGCSRENETEIIKCLRNKDP

SEQ ID NO: 13755 - protein, 29 aa, Artificial sequence
  synthetic peptide
RTLNLAKLTGCSRENETEIIKCLRNKDPQ

SEQ ID NO: 13756 - protein, 29 aa, Artificial sequence
  synthetic peptide
TLNLAKLTGCSRENETEIIKCLRNKDPQE

SEQ ID NO: 13757 - protein, 29 aa, Artificial sequence
  synthetic peptide
LNLAKLTGCSRENETEIIKCLRNKDPQEI

SEQ ID NO: 13758 - protein, 29 aa, Artificial sequence
  synthetic peptide
NLAKLTGCSRENETEIIKCLRNKDPQEIL

SEQ ID NO: 13759 - protein, 29 aa, Artificial sequence
  synthetic peptide
LAKLTGCSRENETEIIKCLRNKDPQEILL

SEQ ID NO: 13760 - protein, 29 aa, Artificial sequence
  synthetic peptide
AKLTGCSRENETEIIKCLRNKDPQEILLN

SEQ ID NO: 13761 - protein, 29 aa, Artificial sequence
  synthetic peptide
KLTGCSRENETEIIKCLRNKDPQEILLNE

SEQ ID NO: 13762 - protein, 29 aa, Artificial sequence
  synthetic peptide
LTGCSRENETEIIKCLRNKDPQEILLNEA

SEQ ID NO: 13763 - protein, 29 aa, Artificial sequence
  synthetic peptide
TGCSRENETEIIKCLRNKDPQEILLNEAF

SEQ ID NO: 13764 - protein, 29 aa, Artificial sequence
  synthetic peptide
GCSRENETEIIKCLRNKDPQEILLNEAFV

SEQ ID NO: 13765 - protein, 29 aa, Artificial sequence
  synthetic peptide
CSRENETEIIKCLRNKDPQEILLNEAFVV

SEQ ID NO: 13766 - protein, 29 aa, Artificial sequence
  synthetic peptide
SRENETEIIKCLRNKDPQEILLNEAFVVP

SEQ ID NO: 13767 - protein, 29 aa, Artificial sequence
  synthetic peptide
RENETEIIKCLRNKDPQEILLNEAFVVPY

SEQ ID NO: 13768 - protein, 29 aa, Artificial sequence
  synthetic peptide
ENETEIIKCLRNKDPQEILLNEAFVVPYG

SEQ ID NO: 13769 - protein, 29 aa, Artificial sequence
  synthetic peptide
NETEIIKCLRNKDPQEILLNEAFVVPYGT

SEQ ID NO: 13770 - protein, 29 aa, Artificial sequence
  synthetic peptide
ETEIIKCLRNKDPQEILLNEAFVVPYGTP

SEQ ID NO: 13771 - protein, 29 aa, Artificial sequence
  synthetic peptide
TEIIKCLRNKDPQEILLNEAFVVPYGTPL

SEQ ID NO: 13772 - protein, 29 aa, Artificial sequence
  synthetic peptide
EIIKCLRNKDPQEILLNEAFVVPYGTPLS

SEQ ID NO: 13773 - protein, 29 aa, Artificial sequence
  synthetic peptide
IIKCLRNKDPQEILLNEAFVVPYGTPLSV

SEQ ID NO: 13774 - protein, 29 aa, Artificial sequence
  synthetic peptide
IKCLRNKDPQEILLNEAFVVPYGTPLSVN

SEQ ID NO: 13775 - protein, 29 aa, Artificial sequence
  synthetic peptide
KCLRNKDPQEILLNEAFVVPYGTPLSVNF

SEQ ID NO: 13776 - protein, 29 aa, Artificial sequence
  synthetic peptide
CLRNKDPQEILLNEAFVVPYGTPLSVNFG

SEQ ID NO: 13777 - protein, 29 aa, Artificial sequence
  synthetic peptide
LRNKDPQEILLNEAFVVPYGTPLSVNFGP

SEQ ID NO: 13778 - protein, 29 aa, Artificial sequence
  synthetic peptide
RNKDPQEILLNEAFVVPYGTPLSVNFGPT

SEQ ID NO: 13779 - protein, 29 aa, Artificial sequence
  synthetic peptide
NKDPQEILLNEAFVVPYGTPLSVNFGPTV

SEQ ID NO: 13780 - protein, 29 aa, Artificial sequence
  synthetic peptide
KDPQEILLNEAFVVPYGTPLSVNFGPTVD

SEQ ID NO: 13781 - protein, 29 aa, Artificial sequence
  synthetic peptide
DPQEILLNEAFVVPYGTPLSVNFGPTVDG

SEQ ID NO: 13782 - protein, 29 aa, Artificial sequence
  synthetic peptide
PQEILLNEAFVVPYGTPLSVNFGPTVDGD

SEQ ID NO: 13783 - protein, 29 aa, Artificial sequence
  synthetic peptide
QEILLNEAFVVPYGTPLSVNFGPTVDGDF

SEQ ID NO: 13784 - protein, 29 aa, Artificial sequence
  synthetic peptide
EILLNEAFVVPYGTPLSVNFGPTVDGDFL

SEQ ID NO: 13785 - protein, 29 aa, Artificial sequence
  synthetic peptide
ILLNEAFVVPYGTPLSVNFGPTVDGDFLT

SEQ ID NO: 13786 - protein, 29 aa, Artificial sequence
  synthetic peptide
LLNEAFVVPYGTPLSVNFGPTVDGDFLTD

SEQ ID NO: 13787 - protein, 29 aa, Artificial sequence
  synthetic peptide
LNEAFVVPYGTPLSVNFGPTVDGDFLTDM

SEQ ID NO: 13788 - protein, 29 aa, Artificial sequence
  synthetic peptide
NEAFVVPYGTPLSVNFGPTVDGDFLTDMP

SEQ ID NO: 13789 - protein, 29 aa, Artificial sequence
  synthetic peptide
EAFVVPYGTPLSVNFGPTVDGDFLTDMPD

SEQ ID NO: 13790 - protein, 29 aa, Artificial sequence
  synthetic peptide
AFVVPYGTPLSVNFGPTVDGDFLTDMPDI

SEQ ID NO: 13791 - protein, 29 aa, Artificial sequence
  synthetic peptide
FVVPYGTPLSVNFGPTVDGDFLTDMPDIL

SEQ ID NO: 13792 - protein, 29 aa, Artificial sequence
  synthetic peptide
VVPYGTPLSVNFGPTVDGDFLTDMPDILL

SEQ ID NO: 13793 - protein, 29 aa, Artificial sequence
  synthetic peptide
VPYGTPLSVNFGPTVDGDFLTDMPDILLE

SEQ ID NO: 13794 - protein, 29 aa, Artificial sequence
  synthetic peptide
PYGTPLSVNFGPTVDGDFLTDMPDILLEL

SEQ ID NO: 13795 - protein, 29 aa, Artificial sequence
  synthetic peptide
YGTPLSVNFGPTVDGDFLTDMPDILLELG

SEQ ID NO: 13796 - protein, 29 aa, Artificial sequence
  synthetic peptide
GTPLSVNFGPTVDGDFLTDMPDILLELGQ

SEQ ID NO: 13797 - protein, 29 aa, Artificial sequence
  synthetic peptide
TPLSVNFGPTVDGDFLTDMPDILLELGQF

SEQ ID NO: 13798 - protein, 29 aa, Artificial sequence
  synthetic peptide
PLSVNFGPTVDGDFLTDMPDILLELGQFK

SEQ ID NO: 13799 - protein, 29 aa, Artificial sequence
  synthetic peptide
LSVNFGPTVDGDFLTDMPDILLELGQFKK

SEQ ID NO: 13800 - protein, 29 aa, Artificial sequence
  synthetic peptide
SVNFGPTVDGDFLTDMPDILLELGQFKKT

SEQ ID NO: 13801 - protein, 29 aa, Artificial sequence
  synthetic peptide
VNFGPTVDGDFLTDMPDILLELGQFKKTQ

SEQ ID NO: 13802 - protein, 29 aa, Artificial sequence
  synthetic peptide
NFGPTVDGDFLTDMPDILLELGQFKKTQI

SEQ ID NO: 13803 - protein, 29 aa, Artificial sequence
  synthetic peptide
FGPTVDGDFLTDMPDILLELGQFKKTQIL

SEQ ID NO: 13804 - protein, 29 aa, Artificial sequence
  synthetic peptide
GPTVDGDFLTDMPDILLELGQFKKTQILV

SEQ ID NO: 13805 - protein, 29 aa, Artificial sequence
  synthetic peptide
PTVDGDFLTDMPDILLELGQFKKTQILVG

SEQ ID NO: 13806 - protein, 29 aa, Artificial sequence
  synthetic peptide
TVDGDFLTDMPDILLELGQFKKTQILVGV

SEQ ID NO: 13807 - protein, 29 aa, Artificial sequence
  synthetic peptide
VDGDFLTDMPDILLELGQFKKTQILVGVN

SEQ ID NO: 13808 - protein, 29 aa, Artificial sequence
  synthetic peptide
DGDFLTDMPDILLELGQFKKTQILVGVNK

SEQ ID NO: 13809 - protein, 29 aa, Artificial sequence
  synthetic peptide
GDFLTDMPDILLELGQFKKTQILVGVNKD

SEQ ID NO: 13810 - protein, 29 aa, Artificial sequence
  synthetic peptide
DFLTDMPDILLELGQFKKTQILVGVNKDE

SEQ ID NO: 13811 - protein, 29 aa, Artificial sequence
  synthetic peptide
FLTDMPDILLELGQFKKTQILVGVNKDEG

SEQ ID NO: 13812 - protein, 29 aa, Artificial sequence
  synthetic peptide
LTDMPDILLELGQFKKTQILVGVNKDEGT

SEQ ID NO: 13813 - protein, 29 aa, Artificial sequence
  synthetic peptide
TDMPDILLELGQFKKTQILVGVNKDEGTA

SEQ ID NO: 13814 - protein, 29 aa, Artificial sequence
  synthetic peptide
DMPDILLELGQFKKTQILVGVNKDEGTAF

SEQ ID NO: 13815 - protein, 29 aa, Artificial sequence
  synthetic peptide
MPDILLELGQFKKTQILVGVNKDEGTAFL

SEQ ID NO: 13816 - protein, 29 aa, Artificial sequence
  synthetic peptide
PDILLELGQFKKTQILVGVNKDEGTAFLV

SEQ ID NO: 13817 - protein, 29 aa, Artificial sequence
  synthetic peptide
DILLELGQFKKTQILVGVNKDEGTAFLVY

SEQ ID NO: 13818 - protein, 29 aa, Artificial sequence
  synthetic peptide
ILLELGQFKKTQILVGVNKDEGTAFLVYG

SEQ ID NO: 13819 - protein, 29 aa, Artificial sequence
  synthetic peptide
LLELGQFKKTQILVGVNKDEGTAFLVYGA

SEQ ID NO: 13820 - protein, 29 aa, Artificial sequence
  synthetic peptide
LELGQFKKTQILVGVNKDEGTAFLVYGAP

SEQ ID NO: 13821 - protein, 29 aa, Artificial sequence
  synthetic peptide
ELGQFKKTQILVGVNKDEGTAFLVYGAPG

SEQ ID NO: 13822 - protein, 29 aa, Artificial sequence
  synthetic peptide
LGQFKKTQILVGVNKDEGTAFLVYGAPGF

SEQ ID NO: 13823 - protein, 29 aa, Artificial sequence
  synthetic peptide
GQFKKTQILVGVNKDEGTAFLVYGAPGFS

SEQ ID NO: 13824 - protein, 29 aa, Artificial sequence
  synthetic peptide
QFKKTQILVGVNKDEGTAFLVYGAPGFSK

SEQ ID NO: 13825 - protein, 29 aa, Artificial sequence
  synthetic peptide
FKKTQILVGVNKDEGTAFLVYGAPGFSKD

SEQ ID NO: 13826 - protein, 29 aa, Artificial sequence
  synthetic peptide
KKTQILVGVNKDEGTAFLVYGAPGFSKDN

SEQ ID NO: 13827 - protein, 29 aa, Artificial sequence
  synthetic peptide
KTQILVGVNKDEGTAFLVYGAPGFSKDNN

SEQ ID NO: 13828 - protein, 29 aa, Artificial sequence
  synthetic peptide
TQILVGVNKDEGTAFLVYGAPGFSKDNNS

SEQ ID NO: 13829 - protein, 29 aa, Artificial sequence
  synthetic peptide
QILVGVNKDEGTAFLVYGAPGFSKDNNSI

SEQ ID NO: 13830 - protein, 29 aa, Artificial sequence
  synthetic peptide
ILVGVNKDEGTAFLVYGAPGFSKDNNSII

SEQ ID NO: 13831 - protein, 29 aa, Artificial sequence
  synthetic peptide
LVGVNKDEGTAFLVYGAPGFSKDNNSIIT

SEQ ID NO: 13832 - protein, 29 aa, Artificial sequence
  synthetic peptide
VGVNKDEGTAFLVYGAPGFSKDNNSIITR

SEQ ID NO: 13833 - protein, 29 aa, Artificial sequence
  synthetic peptide
GVNKDEGTAFLVYGAPGFSKDNNSIITRK

SEQ ID NO: 13834 - protein, 29 aa, Artificial sequence
  synthetic peptide
VNKDEGTAFLVYGAPGFSKDNNSIITRKE

SEQ ID NO: 13835 - protein, 29 aa, Artificial sequence
  synthetic peptide
NKDEGTAFLVYGAPGFSKDNNSIITRKEF

SEQ ID NO: 13836 - protein, 29 aa, Artificial sequence
  synthetic peptide
KDEGTAFLVYGAPGFSKDNNSIITRKEFQ

SEQ ID NO: 13837 - protein, 29 aa, Artificial sequence
  synthetic peptide
DEGTAFLVYGAPGFSKDNNSIITRKEFQE

SEQ ID NO: 13838 - protein, 29 aa, Artificial sequence
  synthetic peptide
EGTAFLVYGAPGFSKDNNSIITRKEFQEG

SEQ ID NO: 13839 - protein, 29 aa, Artificial sequence
  synthetic peptide
GTAFLVYGAPGFSKDNNSIITRKEFQEGL

SEQ ID NO: 13840 - protein, 29 aa, Artificial sequence
  synthetic peptide
TAFLVYGAPGFSKDNNSIITRKEFQEGLK

SEQ ID NO: 13841 - protein, 29 aa, Artificial sequence
  synthetic peptide
AFLVYGAPGFSKDNNSIITRKEFQEGLKI

SEQ ID NO: 13842 - protein, 29 aa, Artificial sequence
  synthetic peptide
FLVYGAPGFSKDNNSIITRKEFQEGLKIF

SEQ ID NO: 13843 - protein, 29 aa, Artificial sequence
  synthetic peptide
LVYGAPGFSKDNNSIITRKEFQEGLKIFF

SEQ ID NO: 13844 - protein, 29 aa, Artificial sequence
  synthetic peptide
VYGAPGFSKDNNSIITRKEFQEGLKIFFP

SEQ ID NO: 13845 - protein, 29 aa, Artificial sequence
  synthetic peptide
YGAPGFSKDNNSIITRKEFQEGLKIFFPG

SEQ ID NO: 13846 - protein, 29 aa, Artificial sequence
  synthetic peptide
GAPGFSKDNNSIITRKEFQEGLKIFFPGV

SEQ ID NO: 13847 - protein, 29 aa, Artificial sequence
  synthetic peptide
APGFSKDNNSIITRKEFQEGLKIFFPGVS

SEQ ID NO: 13848 - protein, 29 aa, Artificial sequence
  synthetic peptide
PGFSKDNNSIITRKEFQEGLKIFFPGVSE

SEQ ID NO: 13849 - protein, 29 aa, Artificial sequence
  synthetic peptide
GFSKDNNSIITRKEFQEGLKIFFPGVSEF

SEQ ID NO: 13850 - protein, 29 aa, Artificial sequence
  synthetic peptide
FSKDNNSIITRKEFQEGLKIFFPGVSEFG

SEQ ID NO: 13851 - protein, 29 aa, Artificial sequence
  synthetic peptide
SKDNNSIITRKEFQEGLKIFFPGVSEFGK

SEQ ID NO: 13852 - protein, 29 aa, Artificial sequence
  synthetic peptide
KDNNSIITRKEFQEGLKIFFPGVSEFGKE

SEQ ID NO: 13853 - protein, 29 aa, Artificial sequence
  synthetic peptide
DNNSIITRKEFQEGLKIFFPGVSEFGKES

SEQ ID NO: 13854 - protein, 29 aa, Artificial sequence
  synthetic peptide
NNSIITRKEFQEGLKIFFPGVSEFGKESI

SEQ ID NO: 13855 - protein, 29 aa, Artificial sequence
  synthetic peptide
NSIITRKEFQEGLKIFFPGVSEFGKESIL

SEQ ID NO: 13856 - protein, 29 aa, Artificial sequence
  synthetic peptide
SIITRKEFQEGLKIFFPGVSEFGKESILF

SEQ ID NO: 13857 - protein, 29 aa, Artificial sequence
  synthetic peptide
IITRKEFQEGLKIFFPGVSEFGKESILFH

SEQ ID NO: 13858 - protein, 29 aa, Artificial sequence
  synthetic peptide
ITRKEFQEGLKIFFPGVSEFGKESILFHY

SEQ ID NO: 13859 - protein, 29 aa, Artificial sequence
  synthetic peptide
TRKEFQEGLKIFFPGVSEFGKESILFHYT

SEQ ID NO: 13860 - protein, 29 aa, Artificial sequence
  synthetic peptide
RKEFQEGLKIFFPGVSEFGKESILFHYTD

SEQ ID NO: 13861 - protein, 29 aa, Artificial sequence
  synthetic peptide
KEFQEGLKIFFPGVSEFGKESILFHYTDW

SEQ ID NO: 13862 - protein, 29 aa, Artificial sequence
  synthetic peptide
EFQEGLKIFFPGVSEFGKESILFHYTDWV

SEQ ID NO: 13863 - protein, 29 aa, Artificial sequence
  synthetic peptide
FQEGLKIFFPGVSEFGKESILFHYTDWVD

SEQ ID NO: 13864 - protein, 29 aa, Artificial sequence
  synthetic peptide
QEGLKIFFPGVSEFGKESILFHYTDWVDD

SEQ ID NO: 13865 - protein, 29 aa, Artificial sequence
  synthetic peptide
EGLKIFFPGVSEFGKESILFHYTDWVDDQ

SEQ ID NO: 13866 - protein, 29 aa, Artificial sequence
  synthetic peptide
GLKIFFPGVSEFGKESILFHYTDWVDDQR

SEQ ID NO: 13867 - protein, 29 aa, Artificial sequence
  synthetic peptide
LKIFFPGVSEFGKESILFHYTDWVDDQRP

SEQ ID NO: 13868 - protein, 29 aa, Artificial sequence
  synthetic peptide
KIFFPGVSEFGKESILFHYTDWVDDQRPE

SEQ ID NO: 13869 - protein, 29 aa, Artificial sequence
  synthetic peptide
IFFPGVSEFGKESILFHYTDWVDDQRPEN

SEQ ID NO: 13870 - protein, 29 aa, Artificial sequence
  synthetic peptide
FFPGVSEFGKESILFHYTDWVDDQRPENY

SEQ ID NO: 13871 - protein, 29 aa, Artificial sequence
  synthetic peptide
FPGVSEFGKESILFHYTDWVDDQRPENYR

SEQ ID NO: 13872 - protein, 29 aa, Artificial sequence
  synthetic peptide
PGVSEFGKESILFHYTDWVDDQRPENYRE

SEQ ID NO: 13873 - protein, 29 aa, Artificial sequence
  synthetic peptide
GVSEFGKESILFHYTDWVDDQRPENYREA

SEQ ID NO: 13874 - protein, 29 aa, Artificial sequence
  synthetic peptide
VSEFGKESILFHYTDWVDDQRPENYREAL

SEQ ID NO: 13875 - protein, 29 aa, Artificial sequence
  synthetic peptide
SEFGKESILFHYTDWVDDQRPENYREALG

SEQ ID NO: 13876 - protein, 29 aa, Artificial sequence
  synthetic peptide
EFGKESILFHYTDWVDDQRPENYREALGD

SEQ ID NO: 13877 - protein, 29 aa, Artificial sequence
  synthetic peptide
FGKESILFHYTDWVDDQRPENYREALGDV

SEQ ID NO: 13878 - protein, 29 aa, Artificial sequence
  synthetic peptide
GKESILFHYTDWVDDQRPENYREALGDVV

SEQ ID NO: 13879 - protein, 29 aa, Artificial sequence
  synthetic peptide
KESILFHYTDWVDDQRPENYREALGDVVG

SEQ ID NO: 13880 - protein, 29 aa, Artificial sequence
  synthetic peptide
ESILFHYTDWVDDQRPENYREALGDVVGD

SEQ ID NO: 13881 - protein, 29 aa, Artificial sequence
  synthetic peptide
SILFHYTDWVDDQRPENYREALGDVVGDY

SEQ ID NO: 13882 - protein, 29 aa, Artificial sequence
  synthetic peptide
ILFHYTDWVDDQRPENYREALGDVVGDYN

SEQ ID NO: 13883 - protein, 29 aa, Artificial sequence
  synthetic peptide
LFHYTDWVDDQRPENYREALGDVVGDYNF

SEQ ID NO: 13884 - protein, 29 aa, Artificial sequence
  synthetic peptide
FHYTDWVDDQRPENYREALGDVVGDYNFI

SEQ ID NO: 13885 - protein, 29 aa, Artificial sequence
  synthetic peptide
HYTDWVDDQRPENYREALGDVVGDYNFIC

SEQ ID NO: 13886 - protein, 29 aa, Artificial sequence
  synthetic peptide
YTDWVDDQRPENYREALGDVVGDYNFICP

SEQ ID NO: 13887 - protein, 29 aa, Artificial sequence
  synthetic peptide
TDWVDDQRPENYREALGDVVGDYNFICPA

SEQ ID NO: 13888 - protein, 29 aa, Artificial sequence
  synthetic peptide
DWVDDQRPENYREALGDVVGDYNFICPAL

SEQ ID NO: 13889 - protein, 29 aa, Artificial sequence
  synthetic peptide
WVDDQRPENYREALGDVVGDYNFICPALE

SEQ ID NO: 13890 - protein, 29 aa, Artificial sequence
  synthetic peptide
VDDQRPENYREALGDVVGDYNFICPALEF

SEQ ID NO: 13891 - protein, 29 aa, Artificial sequence
  synthetic peptide
DDQRPENYREALGDVVGDYNFICPALEFT

SEQ ID NO: 13892 - protein, 29 aa, Artificial sequence
  synthetic peptide
DQRPENYREALGDVVGDYNFICPALEFTK

SEQ ID NO: 13893 - protein, 29 aa, Artificial sequence
  synthetic peptide
QRPENYREALGDVVGDYNFICPALEFTKK

SEQ ID NO: 13894 - protein, 29 aa, Artificial sequence
  synthetic peptide
RPENYREALGDVVGDYNFICPALEFTKKF

SEQ ID NO: 13895 - protein, 29 aa, Artificial sequence
  synthetic peptide
PENYREALGDVVGDYNFICPALEFTKKFS

SEQ ID NO: 13896 - protein, 29 aa, Artificial sequence
  synthetic peptide
ENYREALGDVVGDYNFICPALEFTKKFSE

SEQ ID NO: 13897 - protein, 29 aa, Artificial sequence
  synthetic peptide
NYREALGDVVGDYNFICPALEFTKKFSEW

SEQ ID NO: 13898 - protein, 29 aa, Artificial sequence
  synthetic peptide
YREALGDVVGDYNFICPALEFTKKFSEWG

SEQ ID NO: 13899 - protein, 29 aa, Artificial sequence
  synthetic peptide
REALGDVVGDYNFICPALEFTKKFSEWGN

SEQ ID NO: 13900 - protein, 29 aa, Artificial sequence
  synthetic peptide
EALGDVVGDYNFICPALEFTKKFSEWGNN

SEQ ID NO: 13901 - protein, 29 aa, Artificial sequence
  synthetic peptide
ALGDVVGDYNFICPALEFTKKFSEWGNNA

SEQ ID NO: 13902 - protein, 29 aa, Artificial sequence
  synthetic peptide
LGDVVGDYNFICPALEFTKKFSEWGNNAF

SEQ ID NO: 13903 - protein, 29 aa, Artificial sequence
  synthetic peptide
GDVVGDYNFICPALEFTKKFSEWGNNAFF

SEQ ID NO: 13904 - protein, 29 aa, Artificial sequence
  synthetic peptide
DVVGDYNFICPALEFTKKFSEWGNNAFFY

SEQ ID NO: 13905 - protein, 29 aa, Artificial sequence
  synthetic peptide
VVGDYNFICPALEFTKKFSEWGNNAFFYY

SEQ ID NO: 13906 - protein, 29 aa, Artificial sequence
  synthetic peptide
VGDYNFICPALEFTKKFSEWGNNAFFYYF

SEQ ID NO: 13907 - protein, 29 aa, Artificial sequence
  synthetic peptide
GDYNFICPALEFTKKFSEWGNNAFFYYFE

SEQ ID NO: 13908 - protein, 29 aa, Artificial sequence
  synthetic peptide
DYNFICPALEFTKKFSEWGNNAFFYYFEH

SEQ ID NO: 13909 - protein, 29 aa, Artificial sequence
  synthetic peptide
YNFICPALEFTKKFSEWGNNAFFYYFEHR

SEQ ID NO: 13910 - protein, 29 aa, Artificial sequence
  synthetic peptide
NFICPALEFTKKFSEWGNNAFFYYFEHRS

SEQ ID NO: 13911 - protein, 29 aa, Artificial sequence
  synthetic peptide
FICPALEFTKKFSEWGNNAFFYYFEHRSS

SEQ ID NO: 13912 - protein, 29 aa, Artificial sequence
  synthetic peptide
ICPALEFTKKFSEWGNNAFFYYFEHRSSK

SEQ ID NO: 13913 - protein, 29 aa, Artificial sequence
  synthetic peptide
CPALEFTKKFSEWGNNAFFYYFEHRSSKL

SEQ ID NO: 13914 - protein, 29 aa, Artificial sequence
  synthetic peptide
PALEFTKKFSEWGNNAFFYYFEHRSSKLP

SEQ ID NO: 13915 - protein, 29 aa, Artificial sequence
  synthetic peptide
ALEFTKKFSEWGNNAFFYYFEHRSSKLPW

SEQ ID NO: 13916 - protein, 29 aa, Artificial sequence
  synthetic peptide
LEFTKKFSEWGNNAFFYYFEHRSSKLPWP

SEQ ID NO: 13917 - protein, 29 aa, Artificial sequence
  synthetic peptide
EFTKKFSEWGNNAFFYYFEHRSSKLPWPE

SEQ ID NO: 13918 - protein, 29 aa, Artificial sequence
  synthetic peptide
FTKKFSEWGNNAFFYYFEHRSSKLPWPEW

SEQ ID NO: 13919 - protein, 29 aa, Artificial sequence
  synthetic peptide
TKKFSEWGNNAFFYYFEHRSSKLPWPEWM

SEQ ID NO: 13920 - protein, 29 aa, Artificial sequence
  synthetic peptide
KKFSEWGNNAFFYYFEHRSSKLPWPEWMG

SEQ ID NO: 13921 - protein, 29 aa, Artificial sequence
  synthetic peptide
KFSEWGNNAFFYYFEHRSSKLPWPEWMGV

SEQ ID NO: 13922 - protein, 29 aa, Artificial sequence
  synthetic peptide
FSEWGNNAFFYYFEHRSSKLPWPEWMGVM

SEQ ID NO: 13923 - protein, 29 aa, Artificial sequence
  synthetic peptide
SEWGNNAFFYYFEHRSSKLPWPEWMGVMH

SEQ ID NO: 13924 - protein, 29 aa, Artificial sequence
  synthetic peptide
EWGNNAFFYYFEHRSSKLPWPEWMGVMHG

SEQ ID NO: 13925 - protein, 29 aa, Artificial sequence
  synthetic peptide
WGNNAFFYYFEHRSSKLPWPEWMGVMHGY

SEQ ID NO: 13926 - protein, 29 aa, Artificial sequence
  synthetic peptide
GNNAFFYYFEHRSSKLPWPEWMGVMHGYE

SEQ ID NO: 13927 - protein, 29 aa, Artificial sequence
  synthetic peptide
NNAFFYYFEHRSSKLPWPEWMGVMHGYEI

SEQ ID NO: 13928 - protein, 29 aa, Artificial sequence
  synthetic peptide
NAFFYYFEHRSSKLPWPEWMGVMHGYEIE

SEQ ID NO: 13929 - protein, 29 aa, Artificial sequence
  synthetic peptide
AFFYYFEHRSSKLPWPEWMGVMHGYEIEF

SEQ ID NO: 13930 - protein, 29 aa, Artificial sequence
  synthetic peptide
FFYYFEHRSSKLPWPEWMGVMHGYEIEFV

SEQ ID NO: 13931 - protein, 29 aa, Artificial sequence
  synthetic peptide
FYYFEHRSSKLPWPEWMGVMHGYEIEFVF

SEQ ID NO: 13932 - protein, 29 aa, Artificial sequence
  synthetic peptide
YYFEHRSSKLPWPEWMGVMHGYEIEFVFG

SEQ ID NO: 13933 - protein, 29 aa, Artificial sequence
  synthetic peptide
YFEHRSSKLPWPEWMGVMHGYEIEFVFGL

SEQ ID NO: 13934 - protein, 29 aa, Artificial sequence
  synthetic peptide
FEHRSSKLPWPEWMGVMHGYEIEFVFGLP

SEQ ID NO: 13935 - protein, 29 aa, Artificial sequence
  synthetic peptide
EHRSSKLPWPEWMGVMHGYEIEFVFGLPL

SEQ ID NO: 13936 - protein, 29 aa, Artificial sequence
  synthetic peptide
HRSSKLPWPEWMGVMHGYEIEFVFGLPLE

SEQ ID NO: 13937 - protein, 29 aa, Artificial sequence
  synthetic peptide
RSSKLPWPEWMGVMHGYEIEFVFGLPLER

SEQ ID NO: 13938 - protein, 29 aa, Artificial sequence
  synthetic peptide
SSKLPWPEWMGVMHGYEIEFVFGLPLERR

SEQ ID NO: 13939 - protein, 29 aa, Artificial sequence
  synthetic peptide
SKLPWPEWMGVMHGYEIEFVFGLPLERRD

SEQ ID NO: 13940 - protein, 29 aa, Artificial sequence
  synthetic peptide
KLPWPEWMGVMHGYEIEFVFGLPLERRDN

SEQ ID NO: 13941 - protein, 29 aa, Artificial sequence
  synthetic peptide
LPWPEWMGVMHGYEIEFVFGLPLERRDNY

SEQ ID NO: 13942 - protein, 29 aa, Artificial sequence
  synthetic peptide
PWPEWMGVMHGYEIEFVFGLPLERRDNYT

SEQ ID NO: 13943 - protein, 29 aa, Artificial sequence
  synthetic peptide
WPEWMGVMHGYEIEFVFGLPLERRDNYTK

SEQ ID NO: 13944 - protein, 29 aa, Artificial sequence
  synthetic peptide
PEWMGVMHGYEIEFVFGLPLERRDNYTKA

SEQ ID NO: 13945 - protein, 29 aa, Artificial sequence
  synthetic peptide
EWMGVMHGYEIEFVFGLPLERRDNYTKAE

SEQ ID NO: 13946 - protein, 29 aa, Artificial sequence
  synthetic peptide
WMGVMHGYEIEFVFGLPLERRDNYTKAEE

SEQ ID NO: 13947 - protein, 29 aa, Artificial sequence
  synthetic peptide
MGVMHGYEIEFVFGLPLERRDNYTKAEEI

SEQ ID NO: 13948 - protein, 29 aa, Artificial sequence
  synthetic peptide
GVMHGYEIEFVFGLPLERRDNYTKAEEIL

SEQ ID NO: 13949 - protein, 29 aa, Artificial sequence
  synthetic peptide
VMHGYEIEFVFGLPLERRDNYTKAEEILS

SEQ ID NO: 13950 - protein, 29 aa, Artificial sequence
  synthetic peptide
MHGYEIEFVFGLPLERRDNYTKAEEILSR

SEQ ID NO: 13951 - protein, 29 aa, Artificial sequence
  synthetic peptide
HGYEIEFVFGLPLERRDNYTKAEEILSRS

SEQ ID NO: 13952 - protein, 29 aa, Artificial sequence
  synthetic peptide
GYEIEFVFGLPLERRDNYTKAEEILSRSI

SEQ ID NO: 13953 - protein, 29 aa, Artificial sequence
  synthetic peptide
YEIEFVFGLPLERRDNYTKAEEILSRSIV

SEQ ID NO: 13954 - protein, 29 aa, Artificial sequence
  synthetic peptide
EIEFVFGLPLERRDNYTKAEEILSRSIVK

SEQ ID NO: 13955 - protein, 29 aa, Artificial sequence
  synthetic peptide
IEFVFGLPLERRDNYTKAEEILSRSIVKR

SEQ ID NO: 13956 - protein, 29 aa, Artificial sequence
  synthetic peptide
EFVFGLPLERRDNYTKAEEILSRSIVKRW

SEQ ID NO: 13957 - protein, 29 aa, Artificial sequence
  synthetic peptide
FVFGLPLERRDNYTKAEEILSRSIVKRWA

SEQ ID NO: 13958 - protein, 29 aa, Artificial sequence
  synthetic peptide
VFGLPLERRDNYTKAEEILSRSIVKRWAN

SEQ ID NO: 13959 - protein, 29 aa, Artificial sequence
  synthetic peptide
FGLPLERRDNYTKAEEILSRSIVKRWANF

SEQ ID NO: 13960 - protein, 29 aa, Artificial sequence
  synthetic peptide
GLPLERRDNYTKAEEILSRSIVKRWANFA

SEQ ID NO: 13961 - protein, 29 aa, Artificial sequence
  synthetic peptide
LPLERRDNYTKAEEILSRSIVKRWANFAK

SEQ ID NO: 13962 - protein, 29 aa, Artificial sequence
  synthetic peptide
PLERRDNYTKAEEILSRSIVKRWANFAKY

SEQ ID NO: 13963 - protein, 29 aa, Artificial sequence
  synthetic peptide
LERRDNYTKAEEILSRSIVKRWANFAKYG

SEQ ID NO: 13964 - protein, 29 aa, Artificial sequence
  synthetic peptide
ERRDNYTKAEEILSRSIVKRWANFAKYGN

SEQ ID NO: 13965 - protein, 29 aa, Artificial sequence
  synthetic peptide
RRDNYTKAEEILSRSIVKRWANFAKYGNP

SEQ ID NO: 13966 - protein, 29 aa, Artificial sequence
  synthetic peptide
RDNYTKAEEILSRSIVKRWANFAKYGNPN

SEQ ID NO: 13967 - protein, 29 aa, Artificial sequence
  synthetic peptide
DNYTKAEEILSRSIVKRWANFAKYGNPNE

SEQ ID NO: 13968 - protein, 29 aa, Artificial sequence
  synthetic peptide
NYTKAEEILSRSIVKRWANFAKYGNPNET

SEQ ID NO: 13969 - protein, 29 aa, Artificial sequence
  synthetic peptide
YTKAEEILSRSIVKRWANFAKYGNPNETQ

SEQ ID NO: 13970 - protein, 29 aa, Artificial sequence
  synthetic peptide
TKAEEILSRSIVKRWANFAKYGNPNETQN

SEQ ID NO: 13971 - protein, 29 aa, Artificial sequence
  synthetic peptide
KAEEILSRSIVKRWANFAKYGNPNETQNN

SEQ ID NO: 13972 - protein, 29 aa, Artificial sequence
  synthetic peptide
AEEILSRSIVKRWANFAKYGNPNETQNNS

SEQ ID NO: 13973 - protein, 29 aa, Artificial sequence
  synthetic peptide
EEILSRSIVKRWANFAKYGNPNETQNNST

SEQ ID NO: 13974 - protein, 29 aa, Artificial sequence
  synthetic peptide
EILSRSIVKRWANFAKYGNPNETQNNSTS

SEQ ID NO: 13975 - protein, 29 aa, Artificial sequence
  synthetic peptide
ILSRSIVKRWANFAKYGNPNETQNNSTSW

SEQ ID NO: 13976 - protein, 29 aa, Artificial sequence
  synthetic peptide
LSRSIVKRWANFAKYGNPNETQNNSTSWP

SEQ ID NO: 13977 - protein, 29 aa, Artificial sequence
  synthetic peptide
SRSIVKRWANFAKYGNPNETQNNSTSWPV

SEQ ID NO: 13978 - protein, 29 aa, Artificial sequence
  synthetic peptide
RSIVKRWANFAKYGNPNETQNNSTSWPVF

SEQ ID NO: 13979 - protein, 29 aa, Artificial sequence
  synthetic peptide
SIVKRWANFAKYGNPNETQNNSTSWPVFK

SEQ ID NO: 13980 - protein, 29 aa, Artificial sequence
  synthetic peptide
IVKRWANFAKYGNPNETQNNSTSWPVFKS

SEQ ID NO: 13981 - protein, 29 aa, Artificial sequence
  synthetic peptide
VKRWANFAKYGNPNETQNNSTSWPVFKST

SEQ ID NO: 13982 - protein, 29 aa, Artificial sequence
  synthetic peptide
KRWANFAKYGNPNETQNNSTSWPVFKSTE

SEQ ID NO: 13983 - protein, 29 aa, Artificial sequence
  synthetic peptide
RWANFAKYGNPNETQNNSTSWPVFKSTEQ

SEQ ID NO: 13984 - protein, 29 aa, Artificial sequence
  synthetic peptide
WANFAKYGNPNETQNNSTSWPVFKSTEQK

SEQ ID NO: 13985 - protein, 29 aa, Artificial sequence
  synthetic peptide
ANFAKYGNPNETQNNSTSWPVFKSTEQKY

SEQ ID NO: 13986 - protein, 29 aa, Artificial sequence
  synthetic peptide
NFAKYGNPNETQNNSTSWPVFKSTEQKYL

SEQ ID NO: 13987 - protein, 29 aa, Artificial sequence
  synthetic peptide
FAKYGNPNETQNNSTSWPVFKSTEQKYLT

SEQ ID NO: 13988 - protein, 29 aa, Artificial sequence
  synthetic peptide
AKYGNPNETQNNSTSWPVFKSTEQKYLTL

SEQ ID NO: 13989 - protein, 29 aa, Artificial sequence
  synthetic peptide
KYGNPNETQNNSTSWPVFKSTEQKYLTLN

SEQ ID NO: 13990 - protein, 29 aa, Artificial sequence
  synthetic peptide
YGNPNETQNNSTSWPVFKSTEQKYLTLNT

SEQ ID NO: 13991 - protein, 29 aa, Artificial sequence
  synthetic peptide
GNPNETQNNSTSWPVFKSTEQKYLTLNTE

SEQ ID NO: 13992 - protein, 29 aa, Artificial sequence
  synthetic peptide
NPNETQNNSTSWPVFKSTEQKYLTLNTES

SEQ ID NO: 13993 - protein, 29 aa, Artificial sequence
  synthetic peptide
PNETQNNSTSWPVFKSTEQKYLTLNTEST

SEQ ID NO: 13994 - protein, 29 aa, Artificial sequence
  synthetic peptide
NETQNNSTSWPVFKSTEQKYLTLNTESTR

SEQ ID NO: 13995 - protein, 29 aa, Artificial sequence
  synthetic peptide
ETQNNSTSWPVFKSTEQKYLTLNTESTRI

SEQ ID NO: 13996 - protein, 29 aa, Artificial sequence
  synthetic peptide
TQNNSTSWPVFKSTEQKYLTLNTESTRIM

SEQ ID NO: 13997 - protein, 29 aa, Artificial sequence
  synthetic peptide
QNNSTSWPVFKSTEQKYLTLNTESTRIMT

SEQ ID NO: 13998 - protein, 29 aa, Artificial sequence
  synthetic peptide
NNSTSWPVFKSTEQKYLTLNTESTRIMTK

SEQ ID NO: 13999 - protein, 29 aa, Artificial sequence
  synthetic peptide
NSTSWPVFKSTEQKYLTLNTESTRIMTKL

SEQ ID NO: 14000 - protein, 29 aa, Artificial sequence
  synthetic peptide
STSWPVFKSTEQKYLTLNTESTRIMTKLR

SEQ ID NO: 14001 - protein, 29 aa, Artificial sequence
  synthetic peptide
TSWPVFKSTEQKYLTLNTESTRIMTKLRA

SEQ ID NO: 14002 - protein, 29 aa, Artificial sequence
  synthetic peptide
SWPVFKSTEQKYLTLNTESTRIMTKLRAQ

SEQ ID NO: 14003 - protein, 29 aa, Artificial sequence
  synthetic peptide
WPVFKSTEQKYLTLNTESTRIMTKLRAQQ

SEQ ID NO: 14004 - protein, 29 aa, Artificial sequence
  synthetic peptide
PVFKSTEQKYLTLNTESTRIMTKLRAQQC

SEQ ID NO: 14005 - protein, 29 aa, Artificial sequence
  synthetic peptide
VFKSTEQKYLTLNTESTRIMTKLRAQQCR

SEQ ID NO: 14006 - protein, 29 aa, Artificial sequence
  synthetic peptide
FKSTEQKYLTLNTESTRIMTKLRAQQCRF

SEQ ID NO: 14007 - protein, 29 aa, Artificial sequence
  synthetic peptide
KSTEQKYLTLNTESTRIMTKLRAQQCRFW

SEQ ID NO: 14008 - protein, 29 aa, Artificial sequence
  synthetic peptide
STEQKYLTLNTESTRIMTKLRAQQCRFWT

SEQ ID NO: 14009 - protein, 29 aa, Artificial sequence
  synthetic peptide
TEQKYLTLNTESTRIMTKLRAQQCRFWTS

SEQ ID NO: 14010 - protein, 29 aa, Artificial sequence
  synthetic peptide
EQKYLTLNTESTRIMTKLRAQQCRFWTSF

SEQ ID NO: 14011 - protein, 29 aa, Artificial sequence
  synthetic peptide
QKYLTLNTESTRIMTKLRAQQCRFWTSFF

SEQ ID NO: 14012 - protein, 29 aa, Artificial sequence
  synthetic peptide
KYLTLNTESTRIMTKLRAQQCRFWTSFFP

SEQ ID NO: 14013 - protein, 29 aa, Artificial sequence
  synthetic peptide
YLTLNTESTRIMTKLRAQQCRFWTSFFPK

SEQ ID NO: 14014 - protein, 29 aa, Artificial sequence
  synthetic peptide
LTLNTESTRIMTKLRAQQCRFWTSFFPKV

SEQ ID NO: 14015 - protein, 29 aa, Artificial sequence
  synthetic peptide
TLNTESTRIMTKLRAQQCRFWTSFFPKVL

SEQ ID NO: 14016 - protein, 29 aa, Artificial sequence
  synthetic peptide
LNTESTRIMTKLRAQQCRFWTSFFPKVLE

SEQ ID NO: 14017 - protein, 29 aa, Artificial sequence
  synthetic peptide
NTESTRIMTKLRAQQCRFWTSFFPKVLEM

SEQ ID NO: 14018 - protein, 29 aa, Artificial sequence
  synthetic peptide
TESTRIMTKLRAQQCRFWTSFFPKVLEMT

SEQ ID NO: 14019 - protein, 29 aa, Artificial sequence
  synthetic peptide
ESTRIMTKLRAQQCRFWTSFFPKVLEMTG

SEQ ID NO: 14020 - protein, 29 aa, Artificial sequence
  synthetic peptide
STRIMTKLRAQQCRFWTSFFPKVLEMTGN

SEQ ID NO: 14021 - protein, 29 aa, Artificial sequence
  synthetic peptide
TRIMTKLRAQQCRFWTSFFPKVLEMTGNI

SEQ ID NO: 14022 - protein, 29 aa, Artificial sequence
  synthetic peptide
RIMTKLRAQQCRFWTSFFPKVLEMTGNID

SEQ ID NO: 14023 - protein, 29 aa, Artificial sequence
  synthetic peptide
IMTKLRAQQCRFWTSFFPKVLEMTGNIDE

SEQ ID NO: 14024 - protein, 29 aa, Artificial sequence
  synthetic peptide
MTKLRAQQCRFWTSFFPKVLEMTGNIDEA

SEQ ID NO: 14025 - protein, 29 aa, Artificial sequence
  synthetic peptide
TKLRAQQCRFWTSFFPKVLEMTGNIDEAE

SEQ ID NO: 14026 - protein, 29 aa, Artificial sequence
  synthetic peptide
KLRAQQCRFWTSFFPKVLEMTGNIDEAEW

SEQ ID NO: 14027 - protein, 29 aa, Artificial sequence
  synthetic peptide
LRAQQCRFWTSFFPKVLEMTGNIDEAEWE

SEQ ID NO: 14028 - protein, 29 aa, Artificial sequence
  synthetic peptide
RAQQCRFWTSFFPKVLEMTGNIDEAEWEW

SEQ ID NO: 14029 - protein, 29 aa, Artificial sequence
  synthetic peptide
AQQCRFWTSFFPKVLEMTGNIDEAEWEWK

SEQ ID NO: 14030 - protein, 29 aa, Artificial sequence
  synthetic peptide
QQCRFWTSFFPKVLEMTGNIDEAEWEWKA

SEQ ID NO: 14031 - protein, 29 aa, Artificial sequence
  synthetic peptide
QCRFWTSFFPKVLEMTGNIDEAEWEWKAG

SEQ ID NO: 14032 - protein, 29 aa, Artificial sequence
  synthetic peptide
CRFWTSFFPKVLEMTGNIDEAEWEWKAGF

SEQ ID NO: 14033 - protein, 29 aa, Artificial sequence
  synthetic peptide
RFWTSFFPKVLEMTGNIDEAEWEWKAGFH

SEQ ID NO: 14034 - protein, 29 aa, Artificial sequence
  synthetic peptide
FWTSFFPKVLEMTGNIDEAEWEWKAGFHR

SEQ ID NO: 14035 - protein, 29 aa, Artificial sequence
  synthetic peptide
WTSFFPKVLEMTGNIDEAEWEWKAGFHRW

SEQ ID NO: 14036 - protein, 29 aa, Artificial sequence
  synthetic peptide
TSFFPKVLEMTGNIDEAEWEWKAGFHRWN

SEQ ID NO: 14037 - protein, 29 aa, Artificial sequence
  synthetic peptide
SFFPKVLEMTGNIDEAEWEWKAGFHRWNN

SEQ ID NO: 14038 - protein, 29 aa, Artificial sequence
  synthetic peptide
FFPKVLEMTGNIDEAEWEWKAGFHRWNNY

SEQ ID NO: 14039 - protein, 29 aa, Artificial sequence
  synthetic peptide
FPKVLEMTGNIDEAEWEWKAGFHRWNNYM

SEQ ID NO: 14040 - protein, 29 aa, Artificial sequence
  synthetic peptide
PKVLEMTGNIDEAEWEWKAGFHRWNNYMM

SEQ ID NO: 14041 - protein, 29 aa, Artificial sequence
  synthetic peptide
KVLEMTGNIDEAEWEWKAGFHRWNNYMMD

SEQ ID NO: 14042 - protein, 29 aa, Artificial sequence
  synthetic peptide
VLEMTGNIDEAEWEWKAGFHRWNNYMMDW

SEQ ID NO: 14043 - protein, 29 aa, Artificial sequence
  synthetic peptide
LEMTGNIDEAEWEWKAGFHRWNNYMMDWK

SEQ ID NO: 14044 - protein, 29 aa, Artificial sequence
  synthetic peptide
EMTGNIDEAEWEWKAGFHRWNNYMMDWKN

SEQ ID NO: 14045 - protein, 29 aa, Artificial sequence
  synthetic peptide
MTGNIDEAEWEWKAGFHRWNNYMMDWKNQ

SEQ ID NO: 14046 - protein, 29 aa, Artificial sequence
  synthetic peptide
TGNIDEAEWEWKAGFHRWNNYMMDWKNQF

SEQ ID NO: 14047 - protein, 29 aa, Artificial sequence
  synthetic peptide
GNIDEAEWEWKAGFHRWNNYMMDWKNQFN

SEQ ID NO: 14048 - protein, 29 aa, Artificial sequence
  synthetic peptide
NIDEAEWEWKAGFHRWNNYMMDWKNQFND

SEQ ID NO: 14049 - protein, 29 aa, Artificial sequence
  synthetic peptide
IDEAEWEWKAGFHRWNNYMMDWKNQFNDY

SEQ ID NO: 14050 - protein, 29 aa, Artificial sequence
  synthetic peptide
DEAEWEWKAGFHRWNNYMMDWKNQFNDYT

SEQ ID NO: 14051 - protein, 29 aa, Artificial sequence
  synthetic peptide
EAEWEWKAGFHRWNNYMMDWKNQFNDYTS

SEQ ID NO: 14052 - protein, 29 aa, Artificial sequence
  synthetic peptide
AEWEWKAGFHRWNNYMMDWKNQFNDYTSK

SEQ ID NO: 14053 - protein, 29 aa, Artificial sequence
  synthetic peptide
EWEWKAGFHRWNNYMMDWKNQFNDYTSKK

SEQ ID NO: 14054 - protein, 29 aa, Artificial sequence
  synthetic peptide
WEWKAGFHRWNNYMMDWKNQFNDYTSKKE

SEQ ID NO: 14055 - protein, 29 aa, Artificial sequence
  synthetic peptide
EWKAGFHRWNNYMMDWKNQFNDYTSKKES

SEQ ID NO: 14056 - protein, 29 aa, Artificial sequence
  synthetic peptide
WKAGFHRWNNYMMDWKNQFNDYTSKKESC

SEQ ID NO: 14057 - protein, 29 aa, Artificial sequence
  synthetic peptide
KAGFHRWNNYMMDWKNQFNDYTSKKESCV

SEQ ID NO: 14058 - protein, 29 aa, Artificial sequence
  synthetic peptide
AGFHRWNNYMMDWKNQFNDYTSKKESCVG

SEQ ID NO: 14059 - protein, 29 aa, Artificial sequence
  synthetic peptide
GFHRWNNYMMDWKNQFNDYTSKKESCVGL

SEQ ID NO: 14060 - protein, 30 aa, Artificial sequence
  synthetic peptide
MHSKVTIICIRFLFWFLLLCMLIGKSHTED

SEQ ID NO: 14061 - protein, 30 aa, Artificial sequence
  synthetic peptide
HSKVTIICIRFLFWFLLLCMLIGKSHTEDD

SEQ ID NO: 14062 - protein, 30 aa, Artificial sequence
  synthetic peptide
SKVTIICIRFLFWFLLLCMLIGKSHTEDDI

SEQ ID NO: 14063 - protein, 30 aa, Artificial sequence
  synthetic peptide
KVTIICIRFLFWFLLLCMLIGKSHTEDDII

SEQ ID NO: 14064 - protein, 30 aa, Artificial sequence
  synthetic peptide
VTIICIRFLFWFLLLCMLIGKSHTEDDIII

SEQ ID NO: 14065 - protein, 30 aa, Artificial sequence
  synthetic peptide
TIICIRFLFWFLLLCMLIGKSHTEDDIIIA

SEQ ID NO: 14066 - protein, 30 aa, Artificial sequence
  synthetic peptide
IICIRFLFWFLLLCMLIGKSHTEDDIIIAT

SEQ ID NO: 14067 - protein, 30 aa, Artificial sequence
  synthetic peptide
ICIRFLFWFLLLCMLIGKSHTEDDIIIATK

SEQ ID NO: 14068 - protein, 30 aa, Artificial sequence
  synthetic peptide
CIRFLFWFLLLCMLIGKSHTEDDIIIATKN

SEQ ID NO: 14069 - protein, 30 aa, Artificial sequence
  synthetic peptide
IRFLFWFLLLCMLIGKSHTEDDIIIATKNG

SEQ ID NO: 14070 - protein, 30 aa, Artificial sequence
  synthetic peptide
RFLFWFLLLCMLIGKSHTEDDIIIATKNGK

SEQ ID NO: 14071 - protein, 30 aa, Artificial sequence
  synthetic peptide
FLFWFLLLCMLIGKSHTEDDIIIATKNGKV

SEQ ID NO: 14072 - protein, 30 aa, Artificial sequence
  synthetic peptide
LFWFLLLCMLIGKSHTEDDIIIATKNGKVR

SEQ ID NO: 14073 - protein, 30 aa, Artificial sequence
  synthetic peptide
FWFLLLCMLIGKSHTEDDIIIATKNGKVRG

SEQ ID NO: 14074 - protein, 30 aa, Artificial sequence
  synthetic peptide
WFLLLCMLIGKSHTEDDIIIATKNGKVRGM

SEQ ID NO: 14075 - protein, 30 aa, Artificial sequence
  synthetic peptide
FLLLCMLIGKSHTEDDIIIATKNGKVRGMN

SEQ ID NO: 14076 - protein, 30 aa, Artificial sequence
  synthetic peptide
LLLCMLIGKSHTEDDIIIATKNGKVRGMNL

SEQ ID NO: 14077 - protein, 30 aa, Artificial sequence
  synthetic peptide
LLCMLIGKSHTEDDIIIATKNGKVRGMNLT

SEQ ID NO: 14078 - protein, 30 aa, Artificial sequence
  synthetic peptide
LCMLIGKSHTEDDIIIATKNGKVRGMNLTV

SEQ ID NO: 14079 - protein, 30 aa, Artificial sequence
  synthetic peptide
CMLIGKSHTEDDIIIATKNGKVRGMNLTVF

SEQ ID NO: 14080 - protein, 30 aa, Artificial sequence
  synthetic peptide
MLIGKSHTEDDIIIATKNGKVRGMNLTVFG

SEQ ID NO: 14081 - protein, 30 aa, Artificial sequence
  synthetic peptide
LIGKSHTEDDIIIATKNGKVRGMNLTVFGG

SEQ ID NO: 14082 - protein, 30 aa, Artificial sequence
  synthetic peptide
IGKSHTEDDIIIATKNGKVRGMNLTVFGGT

SEQ ID NO: 14083 - protein, 30 aa, Artificial sequence
  synthetic peptide
GKSHTEDDIIIATKNGKVRGMNLTVFGGTV

SEQ ID NO: 14084 - protein, 30 aa, Artificial sequence
  synthetic peptide
KSHTEDDIIIATKNGKVRGMNLTVFGGTVT

SEQ ID NO: 14085 - protein, 30 aa, Artificial sequence
  synthetic peptide
SHTEDDIIIATKNGKVRGMNLTVFGGTVTA

SEQ ID NO: 14086 - protein, 30 aa, Artificial sequence
  synthetic peptide
HTEDDIIIATKNGKVRGMNLTVFGGTVTAF

SEQ ID NO: 14087 - protein, 30 aa, Artificial sequence
  synthetic peptide
TEDDIIIATKNGKVRGMNLTVFGGTVTAFL

SEQ ID NO: 14088 - protein, 30 aa, Artificial sequence
  synthetic peptide
EDDIIIATKNGKVRGMNLTVFGGTVTAFLG

SEQ ID NO: 14089 - protein, 30 aa, Artificial sequence
  synthetic peptide
DDIIIATKNGKVRGMNLTVFGGTVTAFLGI

SEQ ID NO: 14090 - protein, 30 aa, Artificial sequence
  synthetic peptide
DIIIATKNGKVRGMNLTVFGGTVTAFLGIP

SEQ ID NO: 14091 - protein, 30 aa, Artificial sequence
  synthetic peptide
IIIATKNGKVRGMNLTVFGGTVTAFLGIPY

SEQ ID NO: 14092 - protein, 30 aa, Artificial sequence
  synthetic peptide
IIATKNGKVRGMNLTVFGGTVTAFLGIPYA

SEQ ID NO: 14093 - protein, 30 aa, Artificial sequence
  synthetic peptide
IATKNGKVRGMNLTVFGGTVTAFLGIPYAQ

SEQ ID NO: 14094 - protein, 30 aa, Artificial sequence
  synthetic peptide
ATKNGKVRGMNLTVFGGTVTAFLGIPYAQP

SEQ ID NO: 14095 - protein, 30 aa, Artificial sequence
  synthetic peptide
TKNGKVRGMNLTVFGGTVTAFLGIPYAQPP

SEQ ID NO: 14096 - protein, 30 aa, Artificial sequence
  synthetic peptide
KNGKVRGMNLTVFGGTVTAFLGIPYAQPPL

SEQ ID NO: 14097 - protein, 30 aa, Artificial sequence
  synthetic peptide
NGKVRGMNLTVFGGTVTAFLGIPYAQPPLG

SEQ ID NO: 14098 - protein, 30 aa, Artificial sequence
  synthetic peptide
GKVRGMNLTVFGGTVTAFLGIPYAQPPLGR

SEQ ID NO: 14099 - protein, 30 aa, Artificial sequence
  synthetic peptide
KVRGMNLTVFGGTVTAFLGIPYAQPPLGRL

SEQ ID NO: 14100 - protein, 30 aa, Artificial sequence
  synthetic peptide
VRGMNLTVFGGTVTAFLGIPYAQPPLGRLR

SEQ ID NO: 14101 - protein, 30 aa, Artificial sequence
  synthetic peptide
RGMNLTVFGGTVTAFLGIPYAQPPLGRLRF

SEQ ID NO: 14102 - protein, 30 aa, Artificial sequence
  synthetic peptide
GMNLTVFGGTVTAFLGIPYAQPPLGRLRFK

SEQ ID NO: 14103 - protein, 30 aa, Artificial sequence
  synthetic peptide
MNLTVFGGTVTAFLGIPYAQPPLGRLRFKK

SEQ ID NO: 14104 - protein, 30 aa, Artificial sequence
  synthetic peptide
NLTVFGGTVTAFLGIPYAQPPLGRLRFKKP

SEQ ID NO: 14105 - protein, 30 aa, Artificial sequence
  synthetic peptide
LTVFGGTVTAFLGIPYAQPPLGRLRFKKPQ

SEQ ID NO: 14106 - protein, 30 aa, Artificial sequence
  synthetic peptide
TVFGGTVTAFLGIPYAQPPLGRLRFKKPQS

SEQ ID NO: 14107 - protein, 30 aa, Artificial sequence
  synthetic peptide
VFGGTVTAFLGIPYAQPPLGRLRFKKPQSL

SEQ ID NO: 14108 - protein, 30 aa, Artificial sequence
  synthetic peptide
FGGTVTAFLGIPYAQPPLGRLRFKKPQSLT

SEQ ID NO: 14109 - protein, 30 aa, Artificial sequence
  synthetic peptide
GGTVTAFLGIPYAQPPLGRLRFKKPQSLTK

SEQ ID NO: 14110 - protein, 30 aa, Artificial sequence
  synthetic peptide
GTVTAFLGIPYAQPPLGRLRFKKPQSLTKW

SEQ ID NO: 14111 - protein, 30 aa, Artificial sequence
  synthetic peptide
TVTAFLGIPYAQPPLGRLRFKKPQSLTKWS

SEQ ID NO: 14112 - protein, 30 aa, Artificial sequence
  synthetic peptide
VTAFLGIPYAQPPLGRLRFKKPQSLTKWSD

SEQ ID NO: 14113 - protein, 30 aa, Artificial sequence
  synthetic peptide
TAFLGIPYAQPPLGRLRFKKPQSLTKWSDI

SEQ ID NO: 14114 - protein, 30 aa, Artificial sequence
  synthetic peptide
AFLGIPYAQPPLGRLRFKKPQSLTKWSDIW

SEQ ID NO: 14115 - protein, 30 aa, Artificial sequence
  synthetic peptide
FLGIPYAQPPLGRLRFKKPQSLTKWSDIWN

SEQ ID NO: 14116 - protein, 30 aa, Artificial sequence
  synthetic peptide
LGIPYAQPPLGRLRFKKPQSLTKWSDIWNA

SEQ ID NO: 14117 - protein, 30 aa, Artificial sequence
  synthetic peptide
GIPYAQPPLGRLRFKKPQSLTKWSDIWNAT

SEQ ID NO: 14118 - protein, 30 aa, Artificial sequence
  synthetic peptide
IPYAQPPLGRLRFKKPQSLTKWSDIWNATK

SEQ ID NO: 14119 - protein, 30 aa, Artificial sequence
  synthetic peptide
PYAQPPLGRLRFKKPQSLTKWSDIWNATKY

SEQ ID NO: 14120 - protein, 30 aa, Artificial sequence
  synthetic peptide
YAQPPLGRLRFKKPQSLTKWSDIWNATKYA

SEQ ID NO: 14121 - protein, 30 aa, Artificial sequence
  synthetic peptide
AQPPLGRLRFKKPQSLTKWSDIWNATKYAN

SEQ ID NO: 14122 - protein, 30 aa, Artificial sequence
  synthetic peptide
QPPLGRLRFKKPQSLTKWSDIWNATKYANS

SEQ ID NO: 14123 - protein, 30 aa, Artificial sequence
  synthetic peptide
PPLGRLRFKKPQSLTKWSDIWNATKYANSC

SEQ ID NO: 14124 - protein, 30 aa, Artificial sequence
  synthetic peptide
PLGRLRFKKPQSLTKWSDIWNATKYANSCC

SEQ ID NO: 14125 - protein, 30 aa, Artificial sequence
  synthetic peptide
LGRLRFKKPQSLTKWSDIWNATKYANSCCQ

SEQ ID NO: 14126 - protein, 30 aa, Artificial sequence
  synthetic peptide
GRLRFKKPQSLTKWSDIWNATKYANSCCQN

SEQ ID NO: 14127 - protein, 30 aa, Artificial sequence
  synthetic peptide
RLRFKKPQSLTKWSDIWNATKYANSCCQNI

SEQ ID NO: 14128 - protein, 30 aa, Artificial sequence
  synthetic peptide
LRFKKPQSLTKWSDIWNATKYANSCCQNID

SEQ ID NO: 14129 - protein, 30 aa, Artificial sequence
  synthetic peptide
RFKKPQSLTKWSDIWNATKYANSCCQNIDQ

SEQ ID NO: 14130 - protein, 30 aa, Artificial sequence
  synthetic peptide
FKKPQSLTKWSDIWNATKYANSCCQNIDQS

SEQ ID NO: 14131 - protein, 30 aa, Artificial sequence
  synthetic peptide
KKPQSLTKWSDIWNATKYANSCCQNIDQSF

SEQ ID NO: 14132 - protein, 30 aa, Artificial sequence
  synthetic peptide
KPQSLTKWSDIWNATKYANSCCQNIDQSFP

SEQ ID NO: 14133 - protein, 30 aa, Artificial sequence
  synthetic peptide
PQSLTKWSDIWNATKYANSCCQNIDQSFPG

SEQ ID NO: 14134 - protein, 30 aa, Artificial sequence
  synthetic peptide
QSLTKWSDIWNATKYANSCCQNIDQSFPGF

SEQ ID NO: 14135 - protein, 30 aa, Artificial sequence
  synthetic peptide
SLTKWSDIWNATKYANSCCQNIDQSFPGFH

SEQ ID NO: 14136 - protein, 30 aa, Artificial sequence
  synthetic peptide
LTKWSDIWNATKYANSCCQNIDQSFPGFHG

SEQ ID NO: 14137 - protein, 30 aa, Artificial sequence
  synthetic peptide
TKWSDIWNATKYANSCCQNIDQSFPGFHGS

SEQ ID NO: 14138 - protein, 30 aa, Artificial sequence
  synthetic peptide
KWSDIWNATKYANSCCQNIDQSFPGFHGSE

SEQ ID NO: 14139 - protein, 30 aa, Artificial sequence
  synthetic peptide
WSDIWNATKYANSCCQNIDQSFPGFHGSEM

SEQ ID NO: 14140 - protein, 30 aa, Artificial sequence
  synthetic peptide
SDIWNATKYANSCCQNIDQSFPGFHGSEMW

SEQ ID NO: 14141 - protein, 30 aa, Artificial sequence
  synthetic peptide
DIWNATKYANSCCQNIDQSFPGFHGSEMWN

SEQ ID NO: 14142 - protein, 30 aa, Artificial sequence
  synthetic peptide
IWNATKYANSCCQNIDQSFPGFHGSEMWNP

SEQ ID NO: 14143 - protein, 30 aa, Artificial sequence
  synthetic peptide
WNATKYANSCCQNIDQSFPGFHGSEMWNPN

SEQ ID NO: 14144 - protein, 30 aa, Artificial sequence
  synthetic peptide
NATKYANSCCQNIDQSFPGFHGSEMWNPNT

SEQ ID NO: 14145 - protein, 30 aa, Artificial sequence
  synthetic peptide
ATKYANSCCQNIDQSFPGFHGSEMWNPNTD

SEQ ID NO: 14146 - protein, 30 aa, Artificial sequence
  synthetic peptide
TKYANSCCQNIDQSFPGFHGSEMWNPNTDL

SEQ ID NO: 14147 - protein, 30 aa, Artificial sequence
  synthetic peptide
KYANSCCQNIDQSFPGFHGSEMWNPNTDLS

SEQ ID NO: 14148 - protein, 30 aa, Artificial sequence
  synthetic peptide
YANSCCQNIDQSFPGFHGSEMWNPNTDLSE

SEQ ID NO: 14149 - protein, 30 aa, Artificial sequence
  synthetic peptide
ANSCCQNIDQSFPGFHGSEMWNPNTDLSED

SEQ ID NO: 14150 - protein, 30 aa, Artificial sequence
  synthetic peptide
NSCCQNIDQSFPGFHGSEMWNPNTDLSEDC

SEQ ID NO: 14151 - protein, 30 aa, Artificial sequence
  synthetic peptide
SCCQNIDQSFPGFHGSEMWNPNTDLSEDCL

SEQ ID NO: 14152 - protein, 30 aa, Artificial sequence
  synthetic peptide
CCQNIDQSFPGFHGSEMWNPNTDLSEDCLY

SEQ ID NO: 14153 - protein, 30 aa, Artificial sequence
  synthetic peptide
CQNIDQSFPGFHGSEMWNPNTDLSEDCLYL

SEQ ID NO: 14154 - protein, 30 aa, Artificial sequence
  synthetic peptide
QNIDQSFPGFHGSEMWNPNTDLSEDCLYLN

SEQ ID NO: 14155 - protein, 30 aa, Artificial sequence
  synthetic peptide
NIDQSFPGFHGSEMWNPNTDLSEDCLYLNV

SEQ ID NO: 14156 - protein, 30 aa, Artificial sequence
  synthetic peptide
IDQSFPGFHGSEMWNPNTDLSEDCLYLNVW

SEQ ID NO: 14157 - protein, 30 aa, Artificial sequence
  synthetic peptide
DQSFPGFHGSEMWNPNTDLSEDCLYLNVWI

SEQ ID NO: 14158 - protein, 30 aa, Artificial sequence
  synthetic peptide
QSFPGFHGSEMWNPNTDLSEDCLYLNVWIP

SEQ ID NO: 14159 - protein, 30 aa, Artificial sequence
  synthetic peptide
SFPGFHGSEMWNPNTDLSEDCLYLNVWIPA

SEQ ID NO: 14160 - protein, 30 aa, Artificial sequence
  synthetic peptide
FPGFHGSEMWNPNTDLSEDCLYLNVWIPAP

SEQ ID NO: 14161 - protein, 30 aa, Artificial sequence
  synthetic peptide
PGFHGSEMWNPNTDLSEDCLYLNVWIPAPK

SEQ ID NO: 14162 - protein, 30 aa, Artificial sequence
  synthetic peptide
GFHGSEMWNPNTDLSEDCLYLNVWIPAPKP

SEQ ID NO: 14163 - protein, 30 aa, Artificial sequence
  synthetic peptide
FHGSEMWNPNTDLSEDCLYLNVWIPAPKPK

SEQ ID NO: 14164 - protein, 30 aa, Artificial sequence
  synthetic peptide
HGSEMWNPNTDLSEDCLYLNVWIPAPKPKN

SEQ ID NO: 14165 - protein, 30 aa, Artificial sequence
  synthetic peptide
GSEMWNPNTDLSEDCLYLNVWIPAPKPKNA

SEQ ID NO: 14166 - protein, 30 aa, Artificial sequence
  synthetic peptide
SEMWNPNTDLSEDCLYLNVWIPAPKPKNAT

SEQ ID NO: 14167 - protein, 30 aa, Artificial sequence
  synthetic peptide
EMWNPNTDLSEDCLYLNVWIPAPKPKNATV

SEQ ID NO: 14168 - protein, 30 aa, Artificial sequence
  synthetic peptide
MWNPNTDLSEDCLYLNVWIPAPKPKNATVL

SEQ ID NO: 14169 - protein, 30 aa, Artificial sequence
  synthetic peptide
WNPNTDLSEDCLYLNVWIPAPKPKNATVLI

SEQ ID NO: 14170 - protein, 30 aa, Artificial sequence
  synthetic peptide
NPNTDLSEDCLYLNVWIPAPKPKNATVLIW

SEQ ID NO: 14171 - protein, 30 aa, Artificial sequence
  synthetic peptide
PNTDLSEDCLYLNVWIPAPKPKNATVLIWI

SEQ ID NO: 14172 - protein, 30 aa, Artificial sequence
  synthetic peptide
NTDLSEDCLYLNVWIPAPKPKNATVLIWIY

SEQ ID NO: 14173 - protein, 30 aa, Artificial sequence
  synthetic peptide
TDLSEDCLYLNVWIPAPKPKNATVLIWIYG

SEQ ID NO: 14174 - protein, 30 aa, Artificial sequence
  synthetic peptide
DLSEDCLYLNVWIPAPKPKNATVLIWIYGG

SEQ ID NO: 14175 - protein, 30 aa, Artificial sequence
  synthetic peptide
LSEDCLYLNVWIPAPKPKNATVLIWIYGGG

SEQ ID NO: 14176 - protein, 30 aa, Artificial sequence
  synthetic peptide
SEDCLYLNVWIPAPKPKNATVLIWIYGGGF

SEQ ID NO: 14177 - protein, 30 aa, Artificial sequence
  synthetic peptide
EDCLYLNVWIPAPKPKNATVLIWIYGGGFQ

SEQ ID NO: 14178 - protein, 30 aa, Artificial sequence
  synthetic peptide
DCLYLNVWIPAPKPKNATVLIWIYGGGFQT

SEQ ID NO: 14179 - protein, 30 aa, Artificial sequence
  synthetic peptide
CLYLNVWIPAPKPKNATVLIWIYGGGFQTG

SEQ ID NO: 14180 - protein, 30 aa, Artificial sequence
  synthetic peptide
LYLNVWIPAPKPKNATVLIWIYGGGFQTGT

SEQ ID NO: 14181 - protein, 30 aa, Artificial sequence
  synthetic peptide
YLNVWIPAPKPKNATVLIWIYGGGFQTGTS

SEQ ID NO: 14182 - protein, 30 aa, Artificial sequence
  synthetic peptide
LNVWIPAPKPKNATVLIWIYGGGFQTGTSS

SEQ ID NO: 14183 - protein, 30 aa, Artificial sequence
  synthetic peptide
NVWIPAPKPKNATVLIWIYGGGFQTGTSSL

SEQ ID NO: 14184 - protein, 30 aa, Artificial sequence
  synthetic peptide
VWIPAPKPKNATVLIWIYGGGFQTGTSSLH

SEQ ID NO: 14185 - protein, 30 aa, Artificial sequence
  synthetic peptide
WIPAPKPKNATVLIWIYGGGFQTGTSSLHV

SEQ ID NO: 14186 - protein, 30 aa, Artificial sequence
  synthetic peptide
IPAPKPKNATVLIWIYGGGFQTGTSSLHVY

SEQ ID NO: 14187 - protein, 30 aa, Artificial sequence
  synthetic peptide
PAPKPKNATVLIWIYGGGFQTGTSSLHVYD

SEQ ID NO: 14188 - protein, 30 aa, Artificial sequence
  synthetic peptide
APKPKNATVLIWIYGGGFQTGTSSLHVYDG

SEQ ID NO: 14189 - protein, 30 aa, Artificial sequence
  synthetic peptide
PKPKNATVLIWIYGGGFQTGTSSLHVYDGK

SEQ ID NO: 14190 - protein, 30 aa, Artificial sequence
  synthetic peptide
KPKNATVLIWIYGGGFQTGTSSLHVYDGKF

SEQ ID NO: 14191 - protein, 30 aa, Artificial sequence
  synthetic peptide
PKNATVLIWIYGGGFQTGTSSLHVYDGKFL

SEQ ID NO: 14192 - protein, 30 aa, Artificial sequence
  synthetic peptide
KNATVLIWIYGGGFQTGTSSLHVYDGKFLA

SEQ ID NO: 14193 - protein, 30 aa, Artificial sequence
  synthetic peptide
NATVLIWIYGGGFQTGTSSLHVYDGKFLAR

SEQ ID NO: 14194 - protein, 30 aa, Artificial sequence
  synthetic peptide
ATVLIWIYGGGFQTGTSSLHVYDGKFLARV

SEQ ID NO: 14195 - protein, 30 aa, Artificial sequence
  synthetic peptide
TVLIWIYGGGFQTGTSSLHVYDGKFLARVE

SEQ ID NO: 14196 - protein, 30 aa, Artificial sequence
  synthetic peptide
VLIWIYGGGFQTGTSSLHVYDGKFLARVER

SEQ ID NO: 14197 - protein, 30 aa, Artificial sequence
  synthetic peptide
LIWIYGGGFQTGTSSLHVYDGKFLARVERV

SEQ ID NO: 14198 - protein, 30 aa, Artificial sequence
  synthetic peptide
IWIYGGGFQTGTSSLHVYDGKFLARVERVI

SEQ ID NO: 14199 - protein, 30 aa, Artificial sequence
  synthetic peptide
WIYGGGFQTGTSSLHVYDGKFLARVERVIV

SEQ ID NO: 14200 - protein, 30 aa, Artificial sequence
  synthetic peptide
IYGGGFQTGTSSLHVYDGKFLARVERVIVV

SEQ ID NO: 14201 - protein, 30 aa, Artificial sequence
  synthetic peptide
YGGGFQTGTSSLHVYDGKFLARVERVIVVS

SEQ ID NO: 14202 - protein, 30 aa, Artificial sequence
  synthetic peptide
GGGFQTGTSSLHVYDGKFLARVERVIVVSM

SEQ ID NO: 14203 - protein, 30 aa, Artificial sequence
  synthetic peptide
GGFQTGTSSLHVYDGKFLARVERVIVVSMN

SEQ ID NO: 14204 - protein, 30 aa, Artificial sequence
  synthetic peptide
GFQTGTSSLHVYDGKFLARVERVIVVSMNY

SEQ ID NO: 14205 - protein, 30 aa, Artificial sequence
  synthetic peptide
FQTGTSSLHVYDGKFLARVERVIVVSMNYR

SEQ ID NO: 14206 - protein, 30 aa, Artificial sequence
  synthetic peptide
QTGTSSLHVYDGKFLARVERVIVVSMNYRV

SEQ ID NO: 14207 - protein, 30 aa, Artificial sequence
  synthetic peptide
TGTSSLHVYDGKFLARVERVIVVSMNYRVG

SEQ ID NO: 14208 - protein, 30 aa, Artificial sequence
  synthetic peptide
GTSSLHVYDGKFLARVERVIVVSMNYRVGA

SEQ ID NO: 14209 - protein, 30 aa, Artificial sequence
  synthetic peptide
TSSLHVYDGKFLARVERVIVVSMNYRVGAL

SEQ ID NO: 14210 - protein, 30 aa, Artificial sequence
  synthetic peptide
SSLHVYDGKFLARVERVIVVSMNYRVGALG

SEQ ID NO: 14211 - protein, 30 aa, Artificial sequence
  synthetic peptide
SLHVYDGKFLARVERVIVVSMNYRVGALGF

SEQ ID NO: 14212 - protein, 30 aa, Artificial sequence
  synthetic peptide
LHVYDGKFLARVERVIVVSMNYRVGALGFL

SEQ ID NO: 14213 - protein, 30 aa, Artificial sequence
  synthetic peptide
HVYDGKFLARVERVIVVSMNYRVGALGFLA

SEQ ID NO: 14214 - protein, 30 aa, Artificial sequence
  synthetic peptide
VYDGKFLARVERVIVVSMNYRVGALGFLAL

SEQ ID NO: 14215 - protein, 30 aa, Artificial sequence
  synthetic peptide
YDGKFLARVERVIVVSMNYRVGALGFLALP

SEQ ID NO: 14216 - protein, 30 aa, Artificial sequence
  synthetic peptide
DGKFLARVERVIVVSMNYRVGALGFLALPG

SEQ ID NO: 14217 - protein, 30 aa, Artificial sequence
  synthetic peptide
GKFLARVERVIVVSMNYRVGALGFLALPGN

SEQ ID NO: 14218 - protein, 30 aa, Artificial sequence
  synthetic peptide
KFLARVERVIVVSMNYRVGALGFLALPGNP

SEQ ID NO: 14219 - protein, 30 aa, Artificial sequence
  synthetic peptide
FLARVERVIVVSMNYRVGALGFLALPGNPE

SEQ ID NO: 14220 - protein, 30 aa, Artificial sequence
  synthetic peptide
LARVERVIVVSMNYRVGALGFLALPGNPEA

SEQ ID NO: 14221 - protein, 30 aa, Artificial sequence
  synthetic peptide
ARVERVIVVSMNYRVGALGFLALPGNPEAP

SEQ ID NO: 14222 - protein, 30 aa, Artificial sequence
  synthetic peptide
RVERVIVVSMNYRVGALGFLALPGNPEAPG

SEQ ID NO: 14223 - protein, 30 aa, Artificial sequence
  synthetic peptide
VERVIVVSMNYRVGALGFLALPGNPEAPGN

SEQ ID NO: 14224 - protein, 30 aa, Artificial sequence
  synthetic peptide
ERVIVVSMNYRVGALGFLALPGNPEAPGNM

SEQ ID NO: 14225 - protein, 30 aa, Artificial sequence
  synthetic peptide
RVIVVSMNYRVGALGFLALPGNPEAPGNMG

SEQ ID NO: 14226 - protein, 30 aa, Artificial sequence
  synthetic peptide
VIVVSMNYRVGALGFLALPGNPEAPGNMGL

SEQ ID NO: 14227 - protein, 30 aa, Artificial sequence
  synthetic peptide
IVVSMNYRVGALGFLALPGNPEAPGNMGLF

SEQ ID NO: 14228 - protein, 30 aa, Artificial sequence
  synthetic peptide
VVSMNYRVGALGFLALPGNPEAPGNMGLFD

SEQ ID NO: 14229 - protein, 30 aa, Artificial sequence
  synthetic peptide
VSMNYRVGALGFLALPGNPEAPGNMGLFDQ

SEQ ID NO: 14230 - protein, 30 aa, Artificial sequence
  synthetic peptide
SMNYRVGALGFLALPGNPEAPGNMGLFDQQ

SEQ ID NO: 14231 - protein, 30 aa, Artificial sequence
  synthetic peptide
MNYRVGALGFLALPGNPEAPGNMGLFDQQL

SEQ ID NO: 14232 - protein, 30 aa, Artificial sequence
  synthetic peptide
NYRVGALGFLALPGNPEAPGNMGLFDQQLA

SEQ ID NO: 14233 - protein, 30 aa, Artificial sequence
  synthetic peptide
YRVGALGFLALPGNPEAPGNMGLFDQQLAL

SEQ ID NO: 14234 - protein, 30 aa, Artificial sequence
  synthetic peptide
RVGALGFLALPGNPEAPGNMGLFDQQLALQ

SEQ ID NO: 14235 - protein, 30 aa, Artificial sequence
  synthetic peptide
VGALGFLALPGNPEAPGNMGLFDQQLALQW

SEQ ID NO: 14236 - protein, 30 aa, Artificial sequence
  synthetic peptide
GALGFLALPGNPEAPGNMGLFDQQLALQWV

SEQ ID NO: 14237 - protein, 30 aa, Artificial sequence
  synthetic peptide
ALGFLALPGNPEAPGNMGLFDQQLALQWVQ

SEQ ID NO: 14238 - protein, 30 aa, Artificial sequence
  synthetic peptide
LGFLALPGNPEAPGNMGLFDQQLALQWVQK

SEQ ID NO: 14239 - protein, 30 aa, Artificial sequence
  synthetic peptide
GFLALPGNPEAPGNMGLFDQQLALQWVQKN

SEQ ID NO: 14240 - protein, 30 aa, Artificial sequence
  synthetic peptide
FLALPGNPEAPGNMGLFDQQLALQWVQKNI

SEQ ID NO: 14241 - protein, 30 aa, Artificial sequence
  synthetic peptide
LALPGNPEAPGNMGLFDQQLALQWVQKNIA

SEQ ID NO: 14242 - protein, 30 aa, Artificial sequence
  synthetic peptide
ALPGNPEAPGNMGLFDQQLALQWVQKNIAA

SEQ ID NO: 14243 - protein, 30 aa, Artificial sequence
  synthetic peptide
LPGNPEAPGNMGLFDQQLALQWVQKNIAAF

SEQ ID NO: 14244 - protein, 30 aa, Artificial sequence
  synthetic peptide
PGNPEAPGNMGLFDQQLALQWVQKNIAAFG

SEQ ID NO: 14245 - protein, 30 aa, Artificial sequence
  synthetic peptide
GNPEAPGNMGLFDQQLALQWVQKNIAAFGG

SEQ ID NO: 14246 - protein, 30 aa, Artificial sequence
  synthetic peptide
NPEAPGNMGLFDQQLALQWVQKNIAAFGGN

SEQ ID NO: 14247 - protein, 30 aa, Artificial sequence
  synthetic peptide
PEAPGNMGLFDQQLALQWVQKNIAAFGGNP

SEQ ID NO: 14248 - protein, 30 aa, Artificial sequence
  synthetic peptide
EAPGNMGLFDQQLALQWVQKNIAAFGGNPK

SEQ ID NO: 14249 - protein, 30 aa, Artificial sequence
  synthetic peptide
APGNMGLFDQQLALQWVQKNIAAFGGNPKS

SEQ ID NO: 14250 - protein, 30 aa, Artificial sequence
  synthetic peptide
PGNMGLFDQQLALQWVQKNIAAFGGNPKSV

SEQ ID NO: 14251 - protein, 30 aa, Artificial sequence
  synthetic peptide
GNMGLFDQQLALQWVQKNIAAFGGNPKSVT

SEQ ID NO: 14252 - protein, 30 aa, Artificial sequence
  synthetic peptide
NMGLFDQQLALQWVQKNIAAFGGNPKSVTL

SEQ ID NO: 14253 - protein, 30 aa, Artificial sequence
  synthetic peptide
MGLFDQQLALQWVQKNIAAFGGNPKSVTLF

SEQ ID NO: 14254 - protein, 30 aa, Artificial sequence
  synthetic peptide
GLFDQQLALQWVQKNIAAFGGNPKSVTLFG

SEQ ID NO: 14255 - protein, 30 aa, Artificial sequence
  synthetic peptide
LFDQQLALQWVQKNIAAFGGNPKSVTLFGE

SEQ ID NO: 14256 - protein, 30 aa, Artificial sequence
  synthetic peptide
FDQQLALQWVQKNIAAFGGNPKSVTLFGES

SEQ ID NO: 14257 - protein, 30 aa, Artificial sequence
  synthetic peptide
DQQLALQWVQKNIAAFGGNPKSVTLFGESA

SEQ ID NO: 14258 - protein, 30 aa, Artificial sequence
  synthetic peptide
QQLALQWVQKNIAAFGGNPKSVTLFGESAG

SEQ ID NO: 14259 - protein, 30 aa, Artificial sequence
  synthetic peptide
QLALQWVQKNIAAFGGNPKSVTLFGESAGA

SEQ ID NO: 14260 - protein, 30 aa, Artificial sequence
  synthetic peptide
LALQWVQKNIAAFGGNPKSVTLFGESAGAA

SEQ ID NO: 14261 - protein, 30 aa, Artificial sequence
  synthetic peptide
ALQWVQKNIAAFGGNPKSVTLFGESAGAAS

SEQ ID NO: 14262 - protein, 30 aa, Artificial sequence
  synthetic peptide
LQWVQKNIAAFGGNPKSVTLFGESAGAASV

SEQ ID NO: 14263 - protein, 30 aa, Artificial sequence
  synthetic peptide
QWVQKNIAAFGGNPKSVTLFGESAGAASVS

SEQ ID NO: 14264 - protein, 30 aa, Artificial sequence
  synthetic peptide
WVQKNIAAFGGNPKSVTLFGESAGAASVSL

SEQ ID NO: 14265 - protein, 30 aa, Artificial sequence
  synthetic peptide
VQKNIAAFGGNPKSVTLFGESAGAASVSLH

SEQ ID NO: 14266 - protein, 30 aa, Artificial sequence
  synthetic peptide
QKNIAAFGGNPKSVTLFGESAGAASVSLHL

SEQ ID NO: 14267 - protein, 30 aa, Artificial sequence
  synthetic peptide
KNIAAFGGNPKSVTLFGESAGAASVSLHLL

SEQ ID NO: 14268 - protein, 30 aa, Artificial sequence
  synthetic peptide
NIAAFGGNPKSVTLFGESAGAASVSLHLLS

SEQ ID NO: 14269 - protein, 30 aa, Artificial sequence
  synthetic peptide
IAAFGGNPKSVTLFGESAGAASVSLHLLSP

SEQ ID NO: 14270 - protein, 30 aa, Artificial sequence
  synthetic peptide
AAFGGNPKSVTLFGESAGAASVSLHLLSPG

SEQ ID NO: 14271 - protein, 30 aa, Artificial sequence
  synthetic peptide
AFGGNPKSVTLFGESAGAASVSLHLLSPGS

SEQ ID NO: 14272 - protein, 30 aa, Artificial sequence
  synthetic peptide
FGGNPKSVTLFGESAGAASVSLHLLSPGSH

SEQ ID NO: 14273 - protein, 30 aa, Artificial sequence
  synthetic peptide
GGNPKSVTLFGESAGAASVSLHLLSPGSHS

SEQ ID NO: 14274 - protein, 30 aa, Artificial sequence
  synthetic peptide
GNPKSVTLFGESAGAASVSLHLLSPGSHSL

SEQ ID NO: 14275 - protein, 30 aa, Artificial sequence
  synthetic peptide
NPKSVTLFGESAGAASVSLHLLSPGSHSLF

SEQ ID NO: 14276 - protein, 30 aa, Artificial sequence
  synthetic peptide
PKSVTLFGESAGAASVSLHLLSPGSHSLFT

SEQ ID NO: 14277 - protein, 30 aa, Artificial sequence
  synthetic peptide
KSVTLFGESAGAASVSLHLLSPGSHSLFTR

SEQ ID NO: 14278 - protein, 30 aa, Artificial sequence
  synthetic peptide
SVTLFGESAGAASVSLHLLSPGSHSLFTRA

SEQ ID NO: 14279 - protein, 30 aa, Artificial sequence
  synthetic peptide
VTLFGESAGAASVSLHLLSPGSHSLFTRAI

SEQ ID NO: 14280 - protein, 30 aa, Artificial sequence
  synthetic peptide
TLFGESAGAASVSLHLLSPGSHSLFTRAIL

SEQ ID NO: 14281 - protein, 30 aa, Artificial sequence
  synthetic peptide
LFGESAGAASVSLHLLSPGSHSLFTRAILQ

SEQ ID NO: 14282 - protein, 30 aa, Artificial sequence
  synthetic peptide
FGESAGAASVSLHLLSPGSHSLFTRAILQS

SEQ ID NO: 14283 - protein, 30 aa, Artificial sequence
  synthetic peptide
GESAGAASVSLHLLSPGSHSLFTRAILQSG

SEQ ID NO: 14284 - protein, 30 aa, Artificial sequence
  synthetic peptide
ESAGAASVSLHLLSPGSHSLFTRAILQSGS

SEQ ID NO: 14285 - protein, 30 aa, Artificial sequence
  synthetic peptide
SAGAASVSLHLLSPGSHSLFTRAILQSGSF

SEQ ID NO: 14286 - protein, 30 aa, Artificial sequence
  synthetic peptide
AGAASVSLHLLSPGSHSLFTRAILQSGSFN

SEQ ID NO: 14287 - protein, 30 aa, Artificial sequence
  synthetic peptide
GAASVSLHLLSPGSHSLFTRAILQSGSFNA

SEQ ID NO: 14288 - protein, 30 aa, Artificial sequence
  synthetic peptide
AASVSLHLLSPGSHSLFTRAILQSGSFNAP

SEQ ID NO: 14289 - protein, 30 aa, Artificial sequence
  synthetic peptide
ASVSLHLLSPGSHSLFTRAILQSGSFNAPW

SEQ ID NO: 14290 - protein, 30 aa, Artificial sequence
  synthetic peptide
SVSLHLLSPGSHSLFTRAILQSGSFNAPWA

SEQ ID NO: 14291 - protein, 30 aa, Artificial sequence
  synthetic peptide
VSLHLLSPGSHSLFTRAILQSGSFNAPWAV

SEQ ID NO: 14292 - protein, 30 aa, Artificial sequence
  synthetic peptide
SLHLLSPGSHSLFTRAILQSGSFNAPWAVT

SEQ ID NO: 14293 - protein, 30 aa, Artificial sequence
  synthetic peptide
LHLLSPGSHSLFTRAILQSGSFNAPWAVTS

SEQ ID NO: 14294 - protein, 30 aa, Artificial sequence
  synthetic peptide
HLLSPGSHSLFTRAILQSGSFNAPWAVTSL

SEQ ID NO: 14295 - protein, 30 aa, Artificial sequence
  synthetic peptide
LLSPGSHSLFTRAILQSGSFNAPWAVTSLY

SEQ ID NO: 14296 - protein, 30 aa, Artificial sequence
  synthetic peptide
LSPGSHSLFTRAILQSGSFNAPWAVTSLYE

SEQ ID NO: 14297 - protein, 30 aa, Artificial sequence
  synthetic peptide
SPGSHSLFTRAILQSGSFNAPWAVTSLYEA

SEQ ID NO: 14298 - protein, 30 aa, Artificial sequence
  synthetic peptide
PGSHSLFTRAILQSGSFNAPWAVTSLYEAR

SEQ ID NO: 14299 - protein, 30 aa, Artificial sequence
  synthetic peptide
GSHSLFTRAILQSGSFNAPWAVTSLYEARN

SEQ ID NO: 14300 - protein, 30 aa, Artificial sequence
  synthetic peptide
SHSLFTRAILQSGSFNAPWAVTSLYEARNR

SEQ ID NO: 14301 - protein, 30 aa, Artificial sequence
  synthetic peptide
HSLFTRAILQSGSFNAPWAVTSLYEARNRT

SEQ ID NO: 14302 - protein, 30 aa, Artificial sequence
  synthetic peptide
SLFTRAILQSGSFNAPWAVTSLYEARNRTL

SEQ ID NO: 14303 - protein, 30 aa, Artificial sequence
  synthetic peptide
LFTRAILQSGSFNAPWAVTSLYEARNRTLN

SEQ ID NO: 14304 - protein, 30 aa, Artificial sequence
  synthetic peptide
FTRAILQSGSFNAPWAVTSLYEARNRTLNL

SEQ ID NO: 14305 - protein, 30 aa, Artificial sequence
  synthetic peptide
TRAILQSGSFNAPWAVTSLYEARNRTLNLA

SEQ ID NO: 14306 - protein, 30 aa, Artificial sequence
  synthetic peptide
RAILQSGSFNAPWAVTSLYEARNRTLNLAK

SEQ ID NO: 14307 - protein, 30 aa, Artificial sequence
  synthetic peptide
AILQSGSFNAPWAVTSLYEARNRTLNLAKL

SEQ ID NO: 14308 - protein, 30 aa, Artificial sequence
  synthetic peptide
ILQSGSFNAPWAVTSLYEARNRTLNLAKLT

SEQ ID NO: 14309 - protein, 30 aa, Artificial sequence
  synthetic peptide
LQSGSFNAPWAVTSLYEARNRTLNLAKLTG

SEQ ID NO: 14310 - protein, 30 aa, Artificial sequence
  synthetic peptide
QSGSFNAPWAVTSLYEARNRTLNLAKLTGC

SEQ ID NO: 14311 - protein, 30 aa, Artificial sequence
  synthetic peptide
SGSFNAPWAVTSLYEARNRTLNLAKLTGCS

SEQ ID NO: 14312 - protein, 30 aa, Artificial sequence
  synthetic peptide
GSFNAPWAVTSLYEARNRTLNLAKLTGCSR

SEQ ID NO: 14313 - protein, 30 aa, Artificial sequence
  synthetic peptide
SFNAPWAVTSLYEARNRTLNLAKLTGCSRE

SEQ ID NO: 14314 - protein, 30 aa, Artificial sequence
  synthetic peptide
FNAPWAVTSLYEARNRTLNLAKLTGCSREN

SEQ ID NO: 14315 - protein, 30 aa, Artificial sequence
  synthetic peptide
NAPWAVTSLYEARNRTLNLAKLTGCSRENE

SEQ ID NO: 14316 - protein, 30 aa, Artificial sequence
  synthetic peptide
APWAVTSLYEARNRTLNLAKLTGCSRENET

SEQ ID NO: 14317 - protein, 30 aa, Artificial sequence
  synthetic peptide
PWAVTSLYEARNRTLNLAKLTGCSRENETE

SEQ ID NO: 14318 - protein, 30 aa, Artificial sequence
  synthetic peptide
WAVTSLYEARNRTLNLAKLTGCSRENETEI

SEQ ID NO: 14319 - protein, 30 aa, Artificial sequence
  synthetic peptide
AVTSLYEARNRTLNLAKLTGCSRENETEII

SEQ ID NO: 14320 - protein, 30 aa, Artificial sequence
  synthetic peptide
VTSLYEARNRTLNLAKLTGCSRENETEIIK

SEQ ID NO: 14321 - protein, 30 aa, Artificial sequence
  synthetic peptide
TSLYEARNRTLNLAKLTGCSRENETEIIKC

SEQ ID NO: 14322 - protein, 30 aa, Artificial sequence
  synthetic peptide
SLYEARNRTLNLAKLTGCSRENETEIIKCL

SEQ ID NO: 14323 - protein, 30 aa, Artificial sequence
  synthetic peptide
LYEARNRTLNLAKLTGCSRENETEIIKCLR

SEQ ID NO: 14324 - protein, 30 aa, Artificial sequence
  synthetic peptide
YEARNRTLNLAKLTGCSRENETEIIKCLRN

SEQ ID NO: 14325 - protein, 30 aa, Artificial sequence
  synthetic peptide
EARNRTLNLAKLTGCSRENETEIIKCLRNK

SEQ ID NO: 14326 - protein, 30 aa, Artificial sequence
  synthetic peptide
ARNRTLNLAKLTGCSRENETEIIKCLRNKD

SEQ ID NO: 14327 - protein, 30 aa, Artificial sequence
  synthetic peptide
RNRTLNLAKLTGCSRENETEIIKCLRNKDP

SEQ ID NO: 14328 - protein, 30 aa, Artificial sequence
  synthetic peptide
NRTLNLAKLTGCSRENETEIIKCLRNKDPQ

SEQ ID NO: 14329 - protein, 30 aa, Artificial sequence
  synthetic peptide
RTLNLAKLTGCSRENETEIIKCLRNKDPQE

SEQ ID NO: 14330 - protein, 30 aa, Artificial sequence
  synthetic peptide
TLNLAKLTGCSRENETEIIKCLRNKDPQEI

SEQ ID NO: 14331 - protein, 30 aa, Artificial sequence
  synthetic peptide
LNLAKLTGCSRENETEIIKCLRNKDPQEIL

SEQ ID NO: 14332 - protein, 30 aa, Artificial sequence
  synthetic peptide
NLAKLTGCSRENETEIIKCLRNKDPQEILL

SEQ ID NO: 14333 - protein, 30 aa, Artificial sequence
  synthetic peptide
LAKLTGCSRENETEIIKCLRNKDPQEILLN

SEQ ID NO: 14334 - protein, 30 aa, Artificial sequence
  synthetic peptide
AKLTGCSRENETEIIKCLRNKDPQEILLNE

SEQ ID NO: 14335 - protein, 30 aa, Artificial sequence
  synthetic peptide
KLTGCSRENETEIIKCLRNKDPQEILLNEA

SEQ ID NO: 14336 - protein, 30 aa, Artificial sequence
  synthetic peptide
LTGCSRENETEIIKCLRNKDPQEILLNEAF

SEQ ID NO: 14337 - protein, 30 aa, Artificial sequence
  synthetic peptide
TGCSRENETEIIKCLRNKDPQEILLNEAFV

SEQ ID NO: 14338 - protein, 30 aa, Artificial sequence
  synthetic peptide
GCSRENETEIIKCLRNKDPQEILLNEAFVV

SEQ ID NO: 14339 - protein, 30 aa, Artificial sequence
  synthetic peptide
CSRENETEIIKCLRNKDPQEILLNEAFVVP

SEQ ID NO: 14340 - protein, 30 aa, Artificial sequence
  synthetic peptide
SRENETEIIKCLRNKDPQEILLNEAFVVPY

SEQ ID NO: 14341 - protein, 30 aa, Artificial sequence
  synthetic peptide
RENETEIIKCLRNKDPQEILLNEAFVVPYG

SEQ ID NO: 14342 - protein, 30 aa, Artificial sequence
  synthetic peptide
ENETEIIKCLRNKDPQEILLNEAFVVPYGT

SEQ ID NO: 14343 - protein, 30 aa, Artificial sequence
  synthetic peptide
NETEIIKCLRNKDPQEILLNEAFVVPYGTP

SEQ ID NO: 14344 - protein, 30 aa, Artificial sequence
  synthetic peptide
ETEIIKCLRNKDPQEILLNEAFVVPYGTPL

SEQ ID NO: 14345 - protein, 30 aa, Artificial sequence
  synthetic peptide
TEIIKCLRNKDPQEILLNEAFVVPYGTPLS

SEQ ID NO: 14346 - protein, 30 aa, Artificial sequence
  synthetic peptide
EIIKCLRNKDPQEILLNEAFVVPYGTPLSV

SEQ ID NO: 14347 - protein, 30 aa, Artificial sequence
  synthetic peptide
IIKCLRNKDPQEILLNEAFVVPYGTPLSVN

SEQ ID NO: 14348 - protein, 30 aa, Artificial sequence
  synthetic peptide
IKCLRNKDPQEILLNEAFVVPYGTPLSVNF

SEQ ID NO: 14349 - protein, 30 aa, Artificial sequence
  synthetic peptide
KCLRNKDPQEILLNEAFVVPYGTPLSVNFG

SEQ ID NO: 14350 - protein, 30 aa, Artificial sequence
  synthetic peptide
CLRNKDPQEILLNEAFVVPYGTPLSVNFGP

SEQ ID NO: 14351 - protein, 30 aa, Artificial sequence
  synthetic peptide
LRNKDPQEILLNEAFVVPYGTPLSVNFGPT

SEQ ID NO: 14352 - protein, 30 aa, Artificial sequence
  synthetic peptide
RNKDPQEILLNEAFVVPYGTPLSVNFGPTV

SEQ ID NO: 14353 - protein, 30 aa, Artificial sequence
  synthetic peptide
NKDPQEILLNEAFVVPYGTPLSVNFGPTVD

SEQ ID NO: 14354 - protein, 30 aa, Artificial sequence
  synthetic peptide
KDPQEILLNEAFVVPYGTPLSVNFGPTVDG

SEQ ID NO: 14355 - protein, 30 aa, Artificial sequence
  synthetic peptide
DPQEILLNEAFVVPYGTPLSVNFGPTVDGD

SEQ ID NO: 14356 - protein, 30 aa, Artificial sequence
  synthetic peptide
PQEILLNEAFVVPYGTPLSVNFGPTVDGDF

SEQ ID NO: 14357 - protein, 30 aa, Artificial sequence
  synthetic peptide
QEILLNEAFVVPYGTPLSVNFGPTVDGDFL

SEQ ID NO: 14358 - protein, 30 aa, Artificial sequence
  synthetic peptide
EILLNEAFVVPYGTPLSVNFGPTVDGDFLT

SEQ ID NO: 14359 - protein, 30 aa, Artificial sequence
  synthetic peptide
ILLNEAFVVPYGTPLSVNFGPTVDGDFLTD

SEQ ID NO: 14360 - protein, 30 aa, Artificial sequence
  synthetic peptide
LLNEAFVVPYGTPLSVNFGPTVDGDFLTDM

SEQ ID NO: 14361 - protein, 30 aa, Artificial sequence
  synthetic peptide
LNEAFVVPYGTPLSVNFGPTVDGDFLTDMP

SEQ ID NO: 14362 - protein, 30 aa, Artificial sequence
  synthetic peptide
NEAFVVPYGTPLSVNFGPTVDGDFLTDMPD

SEQ ID NO: 14363 - protein, 30 aa, Artificial sequence
  synthetic peptide
EAFVVPYGTPLSVNFGPTVDGDFLTDMPDI

SEQ ID NO: 14364 - protein, 30 aa, Artificial sequence
  synthetic peptide
AFVVPYGTPLSVNFGPTVDGDFLTDMPDIL

SEQ ID NO: 14365 - protein, 30 aa, Artificial sequence
  synthetic peptide
FVVPYGTPLSVNFGPTVDGDFLTDMPDILL

SEQ ID NO: 14366 - protein, 30 aa, Artificial sequence
  synthetic peptide
VVPYGTPLSVNFGPTVDGDFLTDMPDILLE

SEQ ID NO: 14367 - protein, 30 aa, Artificial sequence
  synthetic peptide
VPYGTPLSVNFGPTVDGDFLTDMPDILLEL

SEQ ID NO: 14368 - protein, 30 aa, Artificial sequence
  synthetic peptide
PYGTPLSVNFGPTVDGDFLTDMPDILLELG

SEQ ID NO: 14369 - protein, 30 aa, Artificial sequence
  synthetic peptide
YGTPLSVNFGPTVDGDFLTDMPDILLELGQ

SEQ ID NO: 14370 - protein, 30 aa, Artificial sequence
  synthetic peptide
GTPLSVNFGPTVDGDFLTDMPDILLELGQF

SEQ ID NO: 14371 - protein, 30 aa, Artificial sequence
  synthetic peptide
TPLSVNFGPTVDGDFLTDMPDILLELGQFK

SEQ ID NO: 14372 - protein, 30 aa, Artificial sequence
  synthetic peptide
PLSVNFGPTVDGDFLTDMPDILLELGQFKK

SEQ ID NO: 14373 - protein, 30 aa, Artificial sequence
  synthetic peptide
LSVNFGPTVDGDFLTDMPDILLELGQFKKT

SEQ ID NO: 14374 - protein, 30 aa, Artificial sequence
  synthetic peptide
SVNFGPTVDGDFLTDMPDILLELGQFKKTQ

SEQ ID NO: 14375 - protein, 30 aa, Artificial sequence
  synthetic peptide
VNFGPTVDGDFLTDMPDILLELGQFKKTQI

SEQ ID NO: 14376 - protein, 30 aa, Artificial sequence
  synthetic peptide
NFGPTVDGDFLTDMPDILLELGQFKKTQIL

SEQ ID NO: 14377 - protein, 30 aa, Artificial sequence
  synthetic peptide
FGPTVDGDFLTDMPDILLELGQFKKTQILV

SEQ ID NO: 14378 - protein, 30 aa, Artificial sequence
  synthetic peptide
GPTVDGDFLTDMPDILLELGQFKKTQILVG

SEQ ID NO: 14379 - protein, 30 aa, Artificial sequence
  synthetic peptide
PTVDGDFLTDMPDILLELGQFKKTQILVGV

SEQ ID NO: 14380 - protein, 30 aa, Artificial sequence
  synthetic peptide
TVDGDFLTDMPDILLELGQFKKTQILVGVN

SEQ ID NO: 14381 - protein, 30 aa, Artificial sequence
  synthetic peptide
VDGDFLTDMPDILLELGQFKKTQILVGVNK

SEQ ID NO: 14382 - protein, 30 aa, Artificial sequence
  synthetic peptide
DGDFLTDMPDILLELGQFKKTQILVGVNKD

SEQ ID NO: 14383 - protein, 30 aa, Artificial sequence
  synthetic peptide
GDFLTDMPDILLELGQFKKTQILVGVNKDE

SEQ ID NO: 14384 - protein, 30 aa, Artificial sequence
  synthetic peptide
DFLTDMPDILLELGQFKKTQILVGVNKDEG

SEQ ID NO: 14385 - protein, 30 aa, Artificial sequence
  synthetic peptide
FLTDMPDILLELGQFKKTQILVGVNKDEGT

SEQ ID NO: 14386 - protein, 30 aa, Artificial sequence
  synthetic peptide
LTDMPDILLELGQFKKTQILVGVNKDEGTA

SEQ ID NO: 14387 - protein, 30 aa, Artificial sequence
  synthetic peptide
TDMPDILLELGQFKKTQILVGVNKDEGTAF

SEQ ID NO: 14388 - protein, 30 aa, Artificial sequence
  synthetic peptide
DMPDILLELGQFKKTQILVGVNKDEGTAFL

SEQ ID NO: 14389 - protein, 30 aa, Artificial sequence
  synthetic peptide
MPDILLELGQFKKTQILVGVNKDEGTAFLV

SEQ ID NO: 14390 - protein, 30 aa, Artificial sequence
  synthetic peptide
PDILLELGQFKKTQILVGVNKDEGTAFLVY

SEQ ID NO: 14391 - protein, 30 aa, Artificial sequence
  synthetic peptide
DILLELGQFKKTQILVGVNKDEGTAFLVYG

SEQ ID NO: 14392 - protein, 30 aa, Artificial sequence
  synthetic peptide
ILLELGQFKKTQILVGVNKDEGTAFLVYGA

SEQ ID NO: 14393 - protein, 30 aa, Artificial sequence
  synthetic peptide
LLELGQFKKTQILVGVNKDEGTAFLVYGAP

SEQ ID NO: 14394 - protein, 30 aa, Artificial sequence
  synthetic peptide
LELGQFKKTQILVGVNKDEGTAFLVYGAPG

SEQ ID NO: 14395 - protein, 30 aa, Artificial sequence
  synthetic peptide
ELGQFKKTQILVGVNKDEGTAFLVYGAPGF

SEQ ID NO: 14396 - protein, 30 aa, Artificial sequence
  synthetic peptide
LGQFKKTQILVGVNKDEGTAFLVYGAPGFS

SEQ ID NO: 14397 - protein, 30 aa, Artificial sequence
  synthetic peptide
GQFKKTQILVGVNKDEGTAFLVYGAPGFSK

SEQ ID NO: 14398 - protein, 30 aa, Artificial sequence
  synthetic peptide
QFKKTQILVGVNKDEGTAFLVYGAPGFSKD

SEQ ID NO: 14399 - protein, 30 aa, Artificial sequence
  synthetic peptide
FKKTQILVGVNKDEGTAFLVYGAPGFSKDN

SEQ ID NO: 14400 - protein, 30 aa, Artificial sequence
  synthetic peptide
KKTQILVGVNKDEGTAFLVYGAPGFSKDNN

SEQ ID NO: 14401 - protein, 30 aa, Artificial sequence
  synthetic peptide
KTQILVGVNKDEGTAFLVYGAPGFSKDNNS

SEQ ID NO: 14402 - protein, 30 aa, Artificial sequence
  synthetic peptide
TQILVGVNKDEGTAFLVYGAPGFSKDNNSI

SEQ ID NO: 14403 - protein, 30 aa, Artificial sequence
  synthetic peptide
QILVGVNKDEGTAFLVYGAPGFSKDNNSII

SEQ ID NO: 14404 - protein, 30 aa, Artificial sequence
  synthetic peptide
ILVGVNKDEGTAFLVYGAPGFSKDNNSIIT

SEQ ID NO: 14405 - protein, 30 aa, Artificial sequence
  synthetic peptide
LVGVNKDEGTAFLVYGAPGFSKDNNSIITR

SEQ ID NO: 14406 - protein, 30 aa, Artificial sequence
  synthetic peptide
VGVNKDEGTAFLVYGAPGFSKDNNSIITRK

SEQ ID NO: 14407 - protein, 30 aa, Artificial sequence
  synthetic peptide
GVNKDEGTAFLVYGAPGFSKDNNSIITRKE

SEQ ID NO: 14408 - protein, 30 aa, Artificial sequence
  synthetic peptide
VNKDEGTAFLVYGAPGFSKDNNSIITRKEF

SEQ ID NO: 14409 - protein, 30 aa, Artificial sequence
  synthetic peptide
NKDEGTAFLVYGAPGFSKDNNSIITRKEFQ

SEQ ID NO: 14410 - protein, 30 aa, Artificial sequence
  synthetic peptide
KDEGTAFLVYGAPGFSKDNNSIITRKEFQE

SEQ ID NO: 14411 - protein, 30 aa, Artificial sequence
  synthetic peptide
DEGTAFLVYGAPGFSKDNNSIITRKEFQEG

SEQ ID NO: 14412 - protein, 30 aa, Artificial sequence
  synthetic peptide
EGTAFLVYGAPGFSKDNNSIITRKEFQEGL

SEQ ID NO: 14413 - protein, 30 aa, Artificial sequence
  synthetic peptide
GTAFLVYGAPGFSKDNNSIITRKEFQEGLK

SEQ ID NO: 14414 - protein, 30 aa, Artificial sequence
  synthetic peptide
TAFLVYGAPGFSKDNNSIITRKEFQEGLKI

SEQ ID NO: 14415 - protein, 30 aa, Artificial sequence
  synthetic peptide
AFLVYGAPGFSKDNNSIITRKEFQEGLKIF

SEQ ID NO: 14416 - protein, 30 aa, Artificial sequence
  synthetic peptide
FLVYGAPGFSKDNNSIITRKEFQEGLKIFF

SEQ ID NO: 14417 - protein, 30 aa, Artificial sequence
  synthetic peptide
LVYGAPGFSKDNNSIITRKEFQEGLKIFFP

SEQ ID NO: 14418 - protein, 30 aa, Artificial sequence
  synthetic peptide
VYGAPGFSKDNNSIITRKEFQEGLKIFFPG

SEQ ID NO: 14419 - protein, 30 aa, Artificial sequence
  synthetic peptide
YGAPGFSKDNNSIITRKEFQEGLKIFFPGV

SEQ ID NO: 14420 - protein, 30 aa, Artificial sequence
  synthetic peptide
GAPGFSKDNNSIITRKEFQEGLKIFFPGVS

SEQ ID NO: 14421 - protein, 30 aa, Artificial sequence
  synthetic peptide
APGFSKDNNSIITRKEFQEGLKIFFPGVSE

SEQ ID NO: 14422 - protein, 30 aa, Artificial sequence
  synthetic peptide
PGFSKDNNSIITRKEFQEGLKIFFPGVSEF

SEQ ID NO: 14423 - protein, 30 aa, Artificial sequence
  synthetic peptide
GFSKDNNSIITRKEFQEGLKIFFPGVSEFG

SEQ ID NO: 14424 - protein, 30 aa, Artificial sequence
  synthetic peptide
FSKDNNSIITRKEFQEGLKIFFPGVSEFGK

SEQ ID NO: 14425 - protein, 30 aa, Artificial sequence
  synthetic peptide
SKDNNSIITRKEFQEGLKIFFPGVSEFGKE

SEQ ID NO: 14426 - protein, 30 aa, Artificial sequence
  synthetic peptide
KDNNSIITRKEFQEGLKIFFPGVSEFGKES

SEQ ID NO: 14427 - protein, 30 aa, Artificial sequence
  synthetic peptide
DNNSIITRKEFQEGLKIFFPGVSEFGKESI

SEQ ID NO: 14428 - protein, 30 aa, Artificial sequence
  synthetic peptide
NNSIITRKEFQEGLKIFFPGVSEFGKESIL

SEQ ID NO: 14429 - protein, 30 aa, Artificial sequence
  synthetic peptide
NSIITRKEFQEGLKIFFPGVSEFGKESILF

SEQ ID NO: 14430 - protein, 30 aa, Artificial sequence
  synthetic peptide
SIITRKEFQEGLKIFFPGVSEFGKESILFH

SEQ ID NO: 14431 - protein, 30 aa, Artificial sequence
  synthetic peptide
IITRKEFQEGLKIFFPGVSEFGKESILFHY

SEQ ID NO: 14432 - protein, 30 aa, Artificial sequence
  synthetic peptide
ITRKEFQEGLKIFFPGVSEFGKESILFHYT

SEQ ID NO: 14433 - protein, 30 aa, Artificial sequence
  synthetic peptide
TRKEFQEGLKIFFPGVSEFGKESILFHYTD

SEQ ID NO: 14434 - protein, 30 aa, Artificial sequence
  synthetic peptide
RKEFQEGLKIFFPGVSEFGKESILFHYTDW

SEQ ID NO: 14435 - protein, 30 aa, Artificial sequence
  synthetic peptide
KEFQEGLKIFFPGVSEFGKESILFHYTDWV

SEQ ID NO: 14436 - protein, 30 aa, Artificial sequence
  synthetic peptide
EFQEGLKIFFPGVSEFGKESILFHYTDWVD

SEQ ID NO: 14437 - protein, 30 aa, Artificial sequence
  synthetic peptide
FQEGLKIFFPGVSEFGKESILFHYTDWVDD

SEQ ID NO: 14438 - protein, 30 aa, Artificial sequence
  synthetic peptide
QEGLKIFFPGVSEFGKESILFHYTDWVDDQ

SEQ ID NO: 14439 - protein, 30 aa, Artificial sequence
  synthetic peptide
EGLKIFFPGVSEFGKESILFHYTDWVDDQR

SEQ ID NO: 14440 - protein, 30 aa, Artificial sequence
  synthetic peptide
GLKIFFPGVSEFGKESILFHYTDWVDDQRP

SEQ ID NO: 14441 - protein, 30 aa, Artificial sequence
  synthetic peptide
LKIFFPGVSEFGKESILFHYTDWVDDQRPE

SEQ ID NO: 14442 - protein, 30 aa, Artificial sequence
  synthetic peptide
KIFFPGVSEFGKESILFHYTDWVDDQRPEN

SEQ ID NO: 14443 - protein, 30 aa, Artificial sequence
  synthetic peptide
IFFPGVSEFGKESILFHYTDWVDDQRPENY

SEQ ID NO: 14444 - protein, 30 aa, Artificial sequence
  synthetic peptide
FFPGVSEFGKESILFHYTDWVDDQRPENYR

SEQ ID NO: 14445 - protein, 30 aa, Artificial sequence
  synthetic peptide
FPGVSEFGKESILFHYTDWVDDQRPENYRE

SEQ ID NO: 14446 - protein, 30 aa, Artificial sequence
  synthetic peptide
PGVSEFGKESILFHYTDWVDDQRPENYREA

SEQ ID NO: 14447 - protein, 30 aa, Artificial sequence
  synthetic peptide
GVSEFGKESILFHYTDWVDDQRPENYREAL

SEQ ID NO: 14448 - protein, 30 aa, Artificial sequence
  synthetic peptide
VSEFGKESILFHYTDWVDDQRPENYREALG

SEQ ID NO: 14449 - protein, 30 aa, Artificial sequence
  synthetic peptide
SEFGKESILFHYTDWVDDQRPENYREALGD

SEQ ID NO: 14450 - protein, 30 aa, Artificial sequence
  synthetic peptide
EFGKESILFHYTDWVDDQRPENYREALGDV

SEQ ID NO: 14451 - protein, 30 aa, Artificial sequence
  synthetic peptide
FGKESILFHYTDWVDDQRPENYREALGDVV

SEQ ID NO: 14452 - protein, 30 aa, Artificial sequence
  synthetic peptide
GKESILFHYTDWVDDQRPENYREALGDVVG

SEQ ID NO: 14453 - protein, 30 aa, Artificial sequence
  synthetic peptide
KESILFHYTDWVDDQRPENYREALGDVVGD

SEQ ID NO: 14454 - protein, 30 aa, Artificial sequence
  synthetic peptide
ESILFHYTDWVDDQRPENYREALGDVVGDY

SEQ ID NO: 14455 - protein, 30 aa, Artificial sequence
  synthetic peptide
SILFHYTDWVDDQRPENYREALGDVVGDYN

SEQ ID NO: 14456 - protein, 30 aa, Artificial sequence
  synthetic peptide
ILFHYTDWVDDQRPENYREALGDVVGDYNF

SEQ ID NO: 14457 - protein, 30 aa, Artificial sequence
  synthetic peptide
LFHYTDWVDDQRPENYREALGDVVGDYNFI

SEQ ID NO: 14458 - protein, 30 aa, Artificial sequence
  synthetic peptide
FHYTDWVDDQRPENYREALGDVVGDYNFIC

SEQ ID NO: 14459 - protein, 30 aa, Artificial sequence
  synthetic peptide
HYTDWVDDQRPENYREALGDVVGDYNFICP

SEQ ID NO: 14460 - protein, 30 aa, Artificial sequence
  synthetic peptide
YTDWVDDQRPENYREALGDVVGDYNFICPA

SEQ ID NO: 14461 - protein, 30 aa, Artificial sequence
  synthetic peptide
TDWVDDQRPENYREALGDVVGDYNFICPAL

SEQ ID NO: 14462 - protein, 30 aa, Artificial sequence
  synthetic peptide
DWVDDQRPENYREALGDVVGDYNFICPALE

SEQ ID NO: 14463 - protein, 30 aa, Artificial sequence
  synthetic peptide
WVDDQRPENYREALGDVVGDYNFICPALEF

SEQ ID NO: 14464 - protein, 30 aa, Artificial sequence
  synthetic peptide
VDDQRPENYREALGDVVGDYNFICPALEFT

SEQ ID NO: 14465 - protein, 30 aa, Artificial sequence
  synthetic peptide
DDQRPENYREALGDVVGDYNFICPALEFTK

SEQ ID NO: 14466 - protein, 30 aa, Artificial sequence
  synthetic peptide
DQRPENYREALGDVVGDYNFICPALEFTKK

SEQ ID NO: 14467 - protein, 30 aa, Artificial sequence
  synthetic peptide
QRPENYREALGDVVGDYNFICPALEFTKKF

SEQ ID NO: 14468 - protein, 30 aa, Artificial sequence
  synthetic peptide
RPENYREALGDVVGDYNFICPALEFTKKFS

SEQ ID NO: 14469 - protein, 30 aa, Artificial sequence
  synthetic peptide
PENYREALGDVVGDYNFICPALEFTKKFSE

SEQ ID NO: 14470 - protein, 30 aa, Artificial sequence
  synthetic peptide
ENYREALGDVVGDYNFICPALEFTKKFSEW

SEQ ID NO: 14471 - protein, 30 aa, Artificial sequence
  synthetic peptide
NYREALGDVVGDYNFICPALEFTKKFSEWG

SEQ ID NO: 14472 - protein, 30 aa, Artificial sequence
  synthetic peptide
YREALGDVVGDYNFICPALEFTKKFSEWGN

SEQ ID NO: 14473 - protein, 30 aa, Artificial sequence
  synthetic peptide
REALGDVVGDYNFICPALEFTKKFSEWGNN

SEQ ID NO: 14474 - protein, 30 aa, Artificial sequence
  synthetic peptide
EALGDVVGDYNFICPALEFTKKFSEWGNNA

SEQ ID NO: 14475 - protein, 30 aa, Artificial sequence
  synthetic peptide
ALGDVVGDYNFICPALEFTKKFSEWGNNAF

SEQ ID NO: 14476 - protein, 30 aa, Artificial sequence
  synthetic peptide
LGDVVGDYNFICPALEFTKKFSEWGNNAFF

SEQ ID NO: 14477 - protein, 30 aa, Artificial sequence
  synthetic peptide
GDVVGDYNFICPALEFTKKFSEWGNNAFFY

SEQ ID NO: 14478 - protein, 30 aa, Artificial sequence
  synthetic peptide
DVVGDYNFICPALEFTKKFSEWGNNAFFYY

SEQ ID NO: 14479 - protein, 30 aa, Artificial sequence
  synthetic peptide
VVGDYNFICPALEFTKKFSEWGNNAFFYYF

SEQ ID NO: 14480 - protein, 30 aa, Artificial sequence
  synthetic peptide
VGDYNFICPALEFTKKFSEWGNNAFFYYFE

SEQ ID NO: 14481 - protein, 30 aa, Artificial sequence
  synthetic peptide
GDYNFICPALEFTKKFSEWGNNAFFYYFEH

SEQ ID NO: 14482 - protein, 30 aa, Artificial sequence
  synthetic peptide
DYNFICPALEFTKKFSEWGNNAFFYYFEHR

SEQ ID NO: 14483 - protein, 30 aa, Artificial sequence
  synthetic peptide
YNFICPALEFTKKFSEWGNNAFFYYFEHRS

SEQ ID NO: 14484 - protein, 30 aa, Artificial sequence
  synthetic peptide
NFICPALEFTKKFSEWGNNAFFYYFEHRSS

SEQ ID NO: 14485 - protein, 30 aa, Artificial sequence
  synthetic peptide
FICPALEFTKKFSEWGNNAFFYYFEHRSSK

SEQ ID NO: 14486 - protein, 30 aa, Artificial sequence
  synthetic peptide
ICPALEFTKKFSEWGNNAFFYYFEHRSSKL

SEQ ID NO: 14487 - protein, 30 aa, Artificial sequence
  synthetic peptide
CPALEFTKKFSEWGNNAFFYYFEHRSSKLP

SEQ ID NO: 14488 - protein, 30 aa, Artificial sequence
  synthetic peptide
PALEFTKKFSEWGNNAFFYYFEHRSSKLPW

SEQ ID NO: 14489 - protein, 30 aa, Artificial sequence
  synthetic peptide
ALEFTKKFSEWGNNAFFYYFEHRSSKLPWP

SEQ ID NO: 14490 - protein, 30 aa, Artificial sequence
  synthetic peptide
LEFTKKFSEWGNNAFFYYFEHRSSKLPWPE

SEQ ID NO: 14491 - protein, 30 aa, Artificial sequence
  synthetic peptide
EFTKKFSEWGNNAFFYYFEHRSSKLPWPEW

SEQ ID NO: 14492 - protein, 30 aa, Artificial sequence
  synthetic peptide
FTKKFSEWGNNAFFYYFEHRSSKLPWPEWM

SEQ ID NO: 14493 - protein, 30 aa, Artificial sequence
  synthetic peptide
TKKFSEWGNNAFFYYFEHRSSKLPWPEWMG

SEQ ID NO: 14494 - protein, 30 aa, Artificial sequence
  synthetic peptide
KKFSEWGNNAFFYYFEHRSSKLPWPEWMGV

SEQ ID NO: 14495 - protein, 30 aa, Artificial sequence
  synthetic peptide
KFSEWGNNAFFYYFEHRSSKLPWPEWMGVM

SEQ ID NO: 14496 - protein, 30 aa, Artificial sequence
  synthetic peptide
FSEWGNNAFFYYFEHRSSKLPWPEWMGVMH

SEQ ID NO: 14497 - protein, 30 aa, Artificial sequence
  synthetic peptide
SEWGNNAFFYYFEHRSSKLPWPEWMGVMHG

SEQ ID NO: 14498 - protein, 30 aa, Artificial sequence
  synthetic peptide
EWGNNAFFYYFEHRSSKLPWPEWMGVMHGY

SEQ ID NO: 14499 - protein, 30 aa, Artificial sequence
  synthetic peptide
WGNNAFFYYFEHRSSKLPWPEWMGVMHGYE

SEQ ID NO: 14500 - protein, 30 aa, Artificial sequence
  synthetic peptide
GNNAFFYYFEHRSSKLPWPEWMGVMHGYEI

SEQ ID NO: 14501 - protein, 30 aa, Artificial sequence
  synthetic peptide
NNAFFYYFEHRSSKLPWPEWMGVMHGYEIE

SEQ ID NO: 14502 - protein, 30 aa, Artificial sequence
  synthetic peptide
NAFFYYFEHRSSKLPWPEWMGVMHGYEIEF

SEQ ID NO: 14503 - protein, 30 aa, Artificial sequence
  synthetic peptide
AFFYYFEHRSSKLPWPEWMGVMHGYEIEFV

SEQ ID NO: 14504 - protein, 30 aa, Artificial sequence
  synthetic peptide
FFYYFEHRSSKLPWPEWMGVMHGYEIEFVF

SEQ ID NO: 14505 - protein, 30 aa, Artificial sequence
  synthetic peptide
FYYFEHRSSKLPWPEWMGVMHGYEIEFVFG

SEQ ID NO: 14506 - protein, 30 aa, Artificial sequence
  synthetic peptide
YYFEHRSSKLPWPEWMGVMHGYEIEFVFGL

SEQ ID NO: 14507 - protein, 30 aa, Artificial sequence
  synthetic peptide
YFEHRSSKLPWPEWMGVMHGYEIEFVFGLP

SEQ ID NO: 14508 - protein, 30 aa, Artificial sequence
  synthetic peptide
FEHRSSKLPWPEWMGVMHGYEIEFVFGLPL

SEQ ID NO: 14509 - protein, 30 aa, Artificial sequence
  synthetic peptide
EHRSSKLPWPEWMGVMHGYEIEFVFGLPLE

SEQ ID NO: 14510 - protein, 30 aa, Artificial sequence
  synthetic peptide
HRSSKLPWPEWMGVMHGYEIEFVFGLPLER

SEQ ID NO: 14511 - protein, 30 aa, Artificial sequence
  synthetic peptide
RSSKLPWPEWMGVMHGYEIEFVFGLPLERR

SEQ ID NO: 14512 - protein, 30 aa, Artificial sequence
  synthetic peptide
SSKLPWPEWMGVMHGYEIEFVFGLPLERRD

SEQ ID NO: 14513 - protein, 30 aa, Artificial sequence
  synthetic peptide
SKLPWPEWMGVMHGYEIEFVFGLPLERRDN

SEQ ID NO: 14514 - protein, 30 aa, Artificial sequence
  synthetic peptide
KLPWPEWMGVMHGYEIEFVFGLPLERRDNY

SEQ ID NO: 14515 - protein, 30 aa, Artificial sequence
  synthetic peptide
LPWPEWMGVMHGYEIEFVFGLPLERRDNYT

SEQ ID NO: 14516 - protein, 30 aa, Artificial sequence
  synthetic peptide
PWPEWMGVMHGYEIEFVFGLPLERRDNYTK

SEQ ID NO: 14517 - protein, 30 aa, Artificial sequence
  synthetic peptide
WPEWMGVMHGYEIEFVFGLPLERRDNYTKA

SEQ ID NO: 14518 - protein, 30 aa, Artificial sequence
  synthetic peptide
PEWMGVMHGYEIEFVFGLPLERRDNYTKAE

SEQ ID NO: 14519 - protein, 30 aa, Artificial sequence
  synthetic peptide
EWMGVMHGYEIEFVFGLPLERRDNYTKAEE

SEQ ID NO: 14520 - protein, 30 aa, Artificial sequence
  synthetic peptide
WMGVMHGYEIEFVFGLPLERRDNYTKAEEI

SEQ ID NO: 14521 - protein, 30 aa, Artificial sequence
  synthetic peptide
MGVMHGYEIEFVFGLPLERRDNYTKAEEIL

SEQ ID NO: 14522 - protein, 30 aa, Artificial sequence
  synthetic peptide
GVMHGYEIEFVFGLPLERRDNYTKAEEILS

SEQ ID NO: 14523 - protein, 30 aa, Artificial sequence
  synthetic peptide
VMHGYEIEFVFGLPLERRDNYTKAEEILSR

SEQ ID NO: 14524 - protein, 30 aa, Artificial sequence
  synthetic peptide
MHGYEIEFVFGLPLERRDNYTKAEEILSRS

SEQ ID NO: 14525 - protein, 30 aa, Artificial sequence
  synthetic peptide
HGYEIEFVFGLPLERRDNYTKAEEILSRSI

SEQ ID NO: 14526 - protein, 30 aa, Artificial sequence
  synthetic peptide
GYEIEFVFGLPLERRDNYTKAEEILSRSIV

SEQ ID NO: 14527 - protein, 30 aa, Artificial sequence
  synthetic peptide
YEIEFVFGLPLERRDNYTKAEEILSRSIVK

SEQ ID NO: 14528 - protein, 30 aa, Artificial sequence
  synthetic peptide
EIEFVFGLPLERRDNYTKAEEILSRSIVKR

SEQ ID NO: 14529 - protein, 30 aa, Artificial sequence
  synthetic peptide
IEFVFGLPLERRDNYTKAEEILSRSIVKRW

SEQ ID NO: 14530 - protein, 30 aa, Artificial sequence
  synthetic peptide
EFVFGLPLERRDNYTKAEEILSRSIVKRWA

SEQ ID NO: 14531 - protein, 30 aa, Artificial sequence
  synthetic peptide
FVFGLPLERRDNYTKAEEILSRSIVKRWAN

SEQ ID NO: 14532 - protein, 30 aa, Artificial sequence
  synthetic peptide
VFGLPLERRDNYTKAEEILSRSIVKRWANF

SEQ ID NO: 14533 - protein, 30 aa, Artificial sequence
  synthetic peptide
FGLPLERRDNYTKAEEILSRSIVKRWANFA

SEQ ID NO: 14534 - protein, 30 aa, Artificial sequence
  synthetic peptide
GLPLERRDNYTKAEEILSRSIVKRWANFAK

SEQ ID NO: 14535 - protein, 30 aa, Artificial sequence
  synthetic peptide
LPLERRDNYTKAEEILSRSIVKRWANFAKY

SEQ ID NO: 14536 - protein, 30 aa, Artificial sequence
  synthetic peptide
PLERRDNYTKAEEILSRSIVKRWANFAKYG

SEQ ID NO: 14537 - protein, 30 aa, Artificial sequence
  synthetic peptide
LERRDNYTKAEEILSRSIVKRWANFAKYGN

SEQ ID NO: 14538 - protein, 30 aa, Artificial sequence
  synthetic peptide
ERRDNYTKAEEILSRSIVKRWANFAKYGNP

SEQ ID NO: 14539 - protein, 30 aa, Artificial sequence
  synthetic peptide
RRDNYTKAEEILSRSIVKRWANFAKYGNPN

SEQ ID NO: 14540 - protein, 30 aa, Artificial sequence
  synthetic peptide
RDNYTKAEEILSRSIVKRWANFAKYGNPNE

SEQ ID NO: 14541 - protein, 30 aa, Artificial sequence
  synthetic peptide
DNYTKAEEILSRSIVKRWANFAKYGNPNET

SEQ ID NO: 14542 - protein, 30 aa, Artificial sequence
  synthetic peptide
NYTKAEEILSRSIVKRWANFAKYGNPNETQ

SEQ ID NO: 14543 - protein, 30 aa, Artificial sequence
  synthetic peptide
YTKAEEILSRSIVKRWANFAKYGNPNETQN

SEQ ID NO: 14544 - protein, 30 aa, Artificial sequence
  synthetic peptide
TKAEEILSRSIVKRWANFAKYGNPNETQNN

SEQ ID NO: 14545 - protein, 30 aa, Artificial sequence
  synthetic peptide
KAEEILSRSIVKRWANFAKYGNPNETQNNS

SEQ ID NO: 14546 - protein, 30 aa, Artificial sequence
  synthetic peptide
AEEILSRSIVKRWANFAKYGNPNETQNNST

SEQ ID NO: 14547 - protein, 30 aa, Artificial sequence
  synthetic peptide
EEILSRSIVKRWANFAKYGNPNETQNNSTS

SEQ ID NO: 14548 - protein, 30 aa, Artificial sequence
  synthetic peptide
EILSRSIVKRWANFAKYGNPNETQNNSTSW

SEQ ID NO: 14549 - protein, 30 aa, Artificial sequence
  synthetic peptide
ILSRSIVKRWANFAKYGNPNETQNNSTSWP

SEQ ID NO: 14550 - protein, 30 aa, Artificial sequence
  synthetic peptide
LSRSIVKRWANFAKYGNPNETQNNSTSWPV

SEQ ID NO: 14551 - protein, 30 aa, Artificial sequence
  synthetic peptide
SRSIVKRWANFAKYGNPNETQNNSTSWPVF

SEQ ID NO: 14552 - protein, 30 aa, Artificial sequence
  synthetic peptide
RSIVKRWANFAKYGNPNETQNNSTSWPVFK

SEQ ID NO: 14553 - protein, 30 aa, Artificial sequence
  synthetic peptide
SIVKRWANFAKYGNPNETQNNSTSWPVFKS

SEQ ID NO: 14554 - protein, 30 aa, Artificial sequence
  synthetic peptide
IVKRWANFAKYGNPNETQNNSTSWPVFKST

SEQ ID NO: 14555 - protein, 30 aa, Artificial sequence
  synthetic peptide
VKRWANFAKYGNPNETQNNSTSWPVFKSTE

SEQ ID NO: 14556 - protein, 30 aa, Artificial sequence
  synthetic peptide
KRWANFAKYGNPNETQNNSTSWPVFKSTEQ

SEQ ID NO: 14557 - protein, 30 aa, Artificial sequence
  synthetic peptide
RWANFAKYGNPNETQNNSTSWPVFKSTEQK

SEQ ID NO: 14558 - protein, 30 aa, Artificial sequence
  synthetic peptide
WANFAKYGNPNETQNNSTSWPVFKSTEQKY

SEQ ID NO: 14559 - protein, 30 aa, Artificial sequence
  synthetic peptide
ANFAKYGNPNETQNNSTSWPVFKSTEQKYL

SEQ ID NO: 14560 - protein, 30 aa, Artificial sequence
  synthetic peptide
NFAKYGNPNETQNNSTSWPVFKSTEQKYLT

SEQ ID NO: 14561 - protein, 30 aa, Artificial sequence
  synthetic peptide
FAKYGNPNETQNNSTSWPVFKSTEQKYLTL

SEQ ID NO: 14562 - protein, 30 aa, Artificial sequence
  synthetic peptide
AKYGNPNETQNNSTSWPVFKSTEQKYLTLN

SEQ ID NO: 14563 - protein, 30 aa, Artificial sequence
  synthetic peptide
KYGNPNETQNNSTSWPVFKSTEQKYLTLNT

SEQ ID NO: 14564 - protein, 30 aa, Artificial sequence
  synthetic peptide
YGNPNETQNNSTSWPVFKSTEQKYLTLNTE

SEQ ID NO: 14565 - protein, 30 aa, Artificial sequence
  synthetic peptide
GNPNETQNNSTSWPVFKSTEQKYLTLNTES

SEQ ID NO: 14566 - protein, 30 aa, Artificial sequence
  synthetic peptide
NPNETQNNSTSWPVFKSTEQKYLTLNTEST

SEQ ID NO: 14567 - protein, 30 aa, Artificial sequence
  synthetic peptide
PNETQNNSTSWPVFKSTEQKYLTLNTESTR

SEQ ID NO: 14568 - protein, 30 aa, Artificial sequence
  synthetic peptide
NETQNNSTSWPVFKSTEQKYLTLNTESTRI

SEQ ID NO: 14569 - protein, 30 aa, Artificial sequence
  synthetic peptide
ETQNNSTSWPVFKSTEQKYLTLNTESTRIM

SEQ ID NO: 14570 - protein, 30 aa, Artificial sequence
  synthetic peptide
TQNNSTSWPVFKSTEQKYLTLNTESTRIMT

SEQ ID NO: 14571 - protein, 30 aa, Artificial sequence
  synthetic peptide
QNNSTSWPVFKSTEQKYLTLNTESTRIMTK

SEQ ID NO: 14572 - protein, 30 aa, Artificial sequence
  synthetic peptide
NNSTSWPVFKSTEQKYLTLNTESTRIMTKL

SEQ ID NO: 14573 - protein, 30 aa, Artificial sequence
  synthetic peptide
NSTSWPVFKSTEQKYLTLNTESTRIMTKLR

SEQ ID NO: 14574 - protein, 30 aa, Artificial sequence
  synthetic peptide
STSWPVFKSTEQKYLTLNTESTRIMTKLRA

SEQ ID NO: 14575 - protein, 30 aa, Artificial sequence
  synthetic peptide
TSWPVFKSTEQKYLTLNTESTRIMTKLRAQ

SEQ ID NO: 14576 - protein, 30 aa, Artificial sequence
  synthetic peptide
SWPVFKSTEQKYLTLNTESTRIMTKLRAQQ

SEQ ID NO: 14577 - protein, 30 aa, Artificial sequence
  synthetic peptide
WPVFKSTEQKYLTLNTESTRIMTKLRAQQC

SEQ ID NO: 14578 - protein, 30 aa, Artificial sequence
  synthetic peptide
PVFKSTEQKYLTLNTESTRIMTKLRAQQCR

SEQ ID NO: 14579 - protein, 30 aa, Artificial sequence
  synthetic peptide
VFKSTEQKYLTLNTESTRIMTKLRAQQCRF

SEQ ID NO: 14580 - protein, 30 aa, Artificial sequence
  synthetic peptide
FKSTEQKYLTLNTESTRIMTKLRAQQCRFW

SEQ ID NO: 14581 - protein, 30 aa, Artificial sequence
  synthetic peptide
KSTEQKYLTLNTESTRIMTKLRAQQCRFWT

SEQ ID NO: 14582 - protein, 30 aa, Artificial sequence
  synthetic peptide
STEQKYLTLNTESTRIMTKLRAQQCRFWTS

SEQ ID NO: 14583 - protein, 30 aa, Artificial sequence
  synthetic peptide
TEQKYLTLNTESTRIMTKLRAQQCRFWTSF

SEQ ID NO: 14584 - protein, 30 aa, Artificial sequence
  synthetic peptide
EQKYLTLNTESTRIMTKLRAQQCRFWTSFF

SEQ ID NO: 14585 - protein, 30 aa, Artificial sequence
  synthetic peptide
QKYLTLNTESTRIMTKLRAQQCRFWTSFFP

SEQ ID NO: 14586 - protein, 30 aa, Artificial sequence
  synthetic peptide
KYLTLNTESTRIMTKLRAQQCRFWTSFFPK

SEQ ID NO: 14587 - protein, 30 aa, Artificial sequence
  synthetic peptide
YLTLNTESTRIMTKLRAQQCRFWTSFFPKV

SEQ ID NO: 14588 - protein, 30 aa, Artificial sequence
  synthetic peptide
LTLNTESTRIMTKLRAQQCRFWTSFFPKVL

SEQ ID NO: 14589 - protein, 30 aa, Artificial sequence
  synthetic peptide
TLNTESTRIMTKLRAQQCRFWTSFFPKVLE

SEQ ID NO: 14590 - protein, 30 aa, Artificial sequence
  synthetic peptide
LNTESTRIMTKLRAQQCRFWTSFFPKVLEM

SEQ ID NO: 14591 - protein, 30 aa, Artificial sequence
  synthetic peptide
NTESTRIMTKLRAQQCRFWTSFFPKVLEMT

SEQ ID NO: 14592 - protein, 30 aa, Artificial sequence
  synthetic peptide
TESTRIMTKLRAQQCRFWTSFFPKVLEMTG

SEQ ID NO: 14593 - protein, 30 aa, Artificial sequence
  synthetic peptide
ESTRIMTKLRAQQCRFWTSFFPKVLEMTGN

SEQ ID NO: 14594 - protein, 30 aa, Artificial sequence
  synthetic peptide
STRIMTKLRAQQCRFWTSFFPKVLEMTGNI

SEQ ID NO: 14595 - protein, 30 aa, Artificial sequence
  synthetic peptide
TRIMTKLRAQQCRFWTSFFPKVLEMTGNID

SEQ ID NO: 14596 - protein, 30 aa, Artificial sequence
  synthetic peptide
RIMTKLRAQQCRFWTSFFPKVLEMTGNIDE

SEQ ID NO: 14597 - protein, 30 aa, Artificial sequence
  synthetic peptide
IMTKLRAQQCRFWTSFFPKVLEMTGNIDEA

SEQ ID NO: 14598 - protein, 30 aa, Artificial sequence
  synthetic peptide
MTKLRAQQCRFWTSFFPKVLEMTGNIDEAE

SEQ ID NO: 14599 - protein, 30 aa, Artificial sequence
  synthetic peptide
TKLRAQQCRFWTSFFPKVLEMTGNIDEAEW

SEQ ID NO: 14600 - protein, 30 aa, Artificial sequence
  synthetic peptide
KLRAQQCRFWTSFFPKVLEMTGNIDEAEWE

SEQ ID NO: 14601 - protein, 30 aa, Artificial sequence
  synthetic peptide
LRAQQCRFWTSFFPKVLEMTGNIDEAEWEW

SEQ ID NO: 14602 - protein, 30 aa, Artificial sequence
  synthetic peptide
RAQQCRFWTSFFPKVLEMTGNIDEAEWEWK

SEQ ID NO: 14603 - protein, 30 aa, Artificial sequence
  synthetic peptide
AQQCRFWTSFFPKVLEMTGNIDEAEWEWKA

SEQ ID NO: 14604 - protein, 30 aa, Artificial sequence
  synthetic peptide
QQCRFWTSFFPKVLEMTGNIDEAEWEWKAG

SEQ ID NO: 14605 - protein, 30 aa, Artificial sequence
  synthetic peptide
QCRFWTSFFPKVLEMTGNIDEAEWEWKAGF

SEQ ID NO: 14606 - protein, 30 aa, Artificial sequence
  synthetic peptide
CRFWTSFFPKVLEMTGNIDEAEWEWKAGFH

SEQ ID NO: 14607 - protein, 30 aa, Artificial sequence
  synthetic peptide
RFWTSFFPKVLEMTGNIDEAEWEWKAGFHR

SEQ ID NO: 14608 - protein, 30 aa, Artificial sequence
  synthetic peptide
FWTSFFPKVLEMTGNIDEAEWEWKAGFHRW

SEQ ID NO: 14609 - protein, 30 aa, Artificial sequence
  synthetic peptide
WTSFFPKVLEMTGNIDEAEWEWKAGFHRWN

SEQ ID NO: 14610 - protein, 30 aa, Artificial sequence
  synthetic peptide
TSFFPKVLEMTGNIDEAEWEWKAGFHRWNN

SEQ ID NO: 14611 - protein, 30 aa, Artificial sequence
  synthetic peptide
SFFPKVLEMTGNIDEAEWEWKAGFHRWNNY

SEQ ID NO: 14612 - protein, 30 aa, Artificial sequence
  synthetic peptide
FFPKVLEMTGNIDEAEWEWKAGFHRWNNYM

SEQ ID NO: 14613 - protein, 30 aa, Artificial sequence
  synthetic peptide
FPKVLEMTGNIDEAEWEWKAGFHRWNNYMM

SEQ ID NO: 14614 - protein, 30 aa, Artificial sequence
  synthetic peptide
PKVLEMTGNIDEAEWEWKAGFHRWNNYMMD

SEQ ID NO: 14615 - protein, 30 aa, Artificial sequence
  synthetic peptide
KVLEMTGNIDEAEWEWKAGFHRWNNYMMDW

SEQ ID NO: 14616 - protein, 30 aa, Artificial sequence
  synthetic peptide
VLEMTGNIDEAEWEWKAGFHRWNNYMMDWK

SEQ ID NO: 14617 - protein, 30 aa, Artificial sequence
  synthetic peptide
LEMTGNIDEAEWEWKAGFHRWNNYMMDWKN

SEQ ID NO: 14618 - protein, 30 aa, Artificial sequence
  synthetic peptide
EMTGNIDEAEWEWKAGFHRWNNYMMDWKNQ

SEQ ID NO: 14619 - protein, 30 aa, Artificial sequence
  synthetic peptide
MTGNIDEAEWEWKAGFHRWNNYMMDWKNQF

SEQ ID NO: 14620 - protein, 30 aa, Artificial sequence
  synthetic peptide
TGNIDEAEWEWKAGFHRWNNYMMDWKNQFN

SEQ ID NO: 14621 - protein, 30 aa, Artificial sequence
  synthetic peptide
GNIDEAEWEWKAGFHRWNNYMMDWKNQFND

SEQ ID NO: 14622 - protein, 30 aa, Artificial sequence
  synthetic peptide
NIDEAEWEWKAGFHRWNNYMMDWKNQFNDY

SEQ ID NO: 14623 - protein, 30 aa, Artificial sequence
  synthetic peptide
IDEAEWEWKAGFHRWNNYMMDWKNQFNDYT

SEQ ID NO: 14624 - protein, 30 aa, Artificial sequence
  synthetic peptide
DEAEWEWKAGFHRWNNYMMDWKNQFNDYTS

SEQ ID NO: 14625 - protein, 30 aa, Artificial sequence
  synthetic peptide
EAEWEWKAGFHRWNNYMMDWKNQFNDYTSK

SEQ ID NO: 14626 - protein, 30 aa, Artificial sequence
  synthetic peptide
AEWEWKAGFHRWNNYMMDWKNQFNDYTSKK

SEQ ID NO: 14627 - protein, 30 aa, Artificial sequence
  synthetic peptide
EWEWKAGFHRWNNYMMDWKNQFNDYTSKKE

SEQ ID NO: 14628 - protein, 30 aa, Artificial sequence
  synthetic peptide
WEWKAGFHRWNNYMMDWKNQFNDYTSKKES

SEQ ID NO: 14629 - protein, 30 aa, Artificial sequence
  synthetic peptide
EWKAGFHRWNNYMMDWKNQFNDYTSKKESC

SEQ ID NO: 14630 - protein, 30 aa, Artificial sequence
  synthetic peptide
WKAGFHRWNNYMMDWKNQFNDYTSKKESCV

SEQ ID NO: 14631 - protein, 30 aa, Artificial sequence
  synthetic peptide
KAGFHRWNNYMMDWKNQFNDYTSKKESCVG

SEQ ID NO: 14632 - protein, 30 aa, Artificial sequence
  synthetic peptide
AGFHRWNNYMMDWKNQFNDYTSKKESCVGL

SEQ ID NO: 14633 - protein, 31 aa, Artificial sequence
  synthetic peptide
MHSKVTIICIRFLFWFLLLCMLIGKSHTEDD

SEQ ID NO: 14634 - protein, 31 aa, Artificial sequence
  synthetic peptide
HSKVTIICIRFLFWFLLLCMLIGKSHTEDDI

SEQ ID NO: 14635 - protein, 31 aa, Artificial sequence
  synthetic peptide
SKVTIICIRFLFWFLLLCMLIGKSHTEDDII

SEQ ID NO: 14636 - protein, 31 aa, Artificial sequence
  synthetic peptide
KVTIICIRFLFWFLLLCMLIGKSHTEDDIII

SEQ ID NO: 14637 - protein, 31 aa, Artificial sequence
  synthetic peptide
VTIICIRFLFWFLLLCMLIGKSHTEDDIIIA

SEQ ID NO: 14638 - protein, 31 aa, Artificial sequence
  synthetic peptide
TIICIRFLFWFLLLCMLIGKSHTEDDIIIAT

SEQ ID NO: 14639 - protein, 31 aa, Artificial sequence
  synthetic peptide
IICIRFLFWFLLLCMLIGKSHTEDDIIIATK

SEQ ID NO: 14640 - protein, 31 aa, Artificial sequence
  synthetic peptide
ICIRFLFWFLLLCMLIGKSHTEDDIIIATKN

SEQ ID NO: 14641 - protein, 31 aa, Artificial sequence
  synthetic peptide
CIRFLFWFLLLCMLIGKSHTEDDIIIATKNG

SEQ ID NO: 14642 - protein, 31 aa, Artificial sequence
  synthetic peptide
IRFLFWFLLLCMLIGKSHTEDDIIIATKNGK

SEQ ID NO: 14643 - protein, 31 aa, Artificial sequence
  synthetic peptide
RFLFWFLLLCMLIGKSHTEDDIIIATKNGKV

SEQ ID NO: 14644 - protein, 31 aa, Artificial sequence
  synthetic peptide
FLFWFLLLCMLIGKSHTEDDIIIATKNGKVR

SEQ ID NO: 14645 - protein, 31 aa, Artificial sequence
  synthetic peptide
LFWFLLLCMLIGKSHTEDDIIIATKNGKVRG

SEQ ID NO: 14646 - protein, 31 aa, Artificial sequence
  synthetic peptide
FWFLLLCMLIGKSHTEDDIIIATKNGKVRGM

SEQ ID NO: 14647 - protein, 31 aa, Artificial sequence
  synthetic peptide
WFLLLCMLIGKSHTEDDIIIATKNGKVRGMN

SEQ ID NO: 14648 - protein, 31 aa, Artificial sequence
  synthetic peptide
FLLLCMLIGKSHTEDDIIIATKNGKVRGMNL

SEQ ID NO: 14649 - protein, 31 aa, Artificial sequence
  synthetic peptide
LLLCMLIGKSHTEDDIIIATKNGKVRGMNLT

SEQ ID NO: 14650 - protein, 31 aa, Artificial sequence
  synthetic peptide
LLCMLIGKSHTEDDIIIATKNGKVRGMNLTV

SEQ ID NO: 14651 - protein, 31 aa, Artificial sequence
  synthetic peptide
LCMLIGKSHTEDDIIIATKNGKVRGMNLTVF

SEQ ID NO: 14652 - protein, 31 aa, Artificial sequence
  synthetic peptide
CMLIGKSHTEDDIIIATKNGKVRGMNLTVFG

SEQ ID NO: 14653 - protein, 31 aa, Artificial sequence
  synthetic peptide
MLIGKSHTEDDIIIATKNGKVRGMNLTVFGG

SEQ ID NO: 14654 - protein, 31 aa, Artificial sequence
  synthetic peptide
LIGKSHTEDDIIIATKNGKVRGMNLTVFGGT

SEQ ID NO: 14655 - protein, 31 aa, Artificial sequence
  synthetic peptide
IGKSHTEDDIIIATKNGKVRGMNLTVFGGTV

SEQ ID NO: 14656 - protein, 31 aa, Artificial sequence
  synthetic peptide
GKSHTEDDIIIATKNGKVRGMNLTVFGGTVT

SEQ ID NO: 14657 - protein, 31 aa, Artificial sequence
  synthetic peptide
KSHTEDDIIIATKNGKVRGMNLTVFGGTVTA

SEQ ID NO: 14658 - protein, 31 aa, Artificial sequence
  synthetic peptide
SHTEDDIIIATKNGKVRGMNLTVFGGTVTAF

SEQ ID NO: 14659 - protein, 31 aa, Artificial sequence
  synthetic peptide
HTEDDIIIATKNGKVRGMNLTVFGGTVTAFL

SEQ ID NO: 14660 - protein, 31 aa, Artificial sequence
  synthetic peptide
TEDDIIIATKNGKVRGMNLTVFGGTVTAFLG

SEQ ID NO: 14661 - protein, 31 aa, Artificial sequence
  synthetic peptide
EDDIIIATKNGKVRGMNLTVFGGTVTAFLGI

SEQ ID NO: 14662 - protein, 31 aa, Artificial sequence
  synthetic peptide
DDIIIATKNGKVRGMNLTVFGGTVTAFLGIP

SEQ ID NO: 14663 - protein, 31 aa, Artificial sequence
  synthetic peptide
DIIIATKNGKVRGMNLTVFGGTVTAFLGIPY

SEQ ID NO: 14664 - protein, 31 aa, Artificial sequence
  synthetic peptide
IIIATKNGKVRGMNLTVFGGTVTAFLGIPYA

SEQ ID NO: 14665 - protein, 31 aa, Artificial sequence
  synthetic peptide
IIATKNGKVRGMNLTVFGGTVTAFLGIPYAQ

SEQ ID NO: 14666 - protein, 31 aa, Artificial sequence
  synthetic peptide
IATKNGKVRGMNLTVFGGTVTAFLGIPYAQP

SEQ ID NO: 14667 - protein, 31 aa, Artificial sequence
  synthetic peptide
ATKNGKVRGMNLTVFGGTVTAFLGIPYAQPP

SEQ ID NO: 14668 - protein, 31 aa, Artificial sequence
  synthetic peptide
TKNGKVRGMNLTVFGGTVTAFLGIPYAQPPL

SEQ ID NO: 14669 - protein, 31 aa, Artificial sequence
  synthetic peptide
KNGKVRGMNLTVFGGTVTAFLGIPYAQPPLG

SEQ ID NO: 14670 - protein, 31 aa, Artificial sequence
  synthetic peptide
NGKVRGMNLTVFGGTVTAFLGIPYAQPPLGR

SEQ ID NO: 14671 - protein, 31 aa, Artificial sequence
  synthetic peptide
GKVRGMNLTVFGGTVTAFLGIPYAQPPLGRL

SEQ ID NO: 14672 - protein, 31 aa, Artificial sequence
  synthetic peptide
KVRGMNLTVFGGTVTAFLGIPYAQPPLGRLR

SEQ ID NO: 14673 - protein, 31 aa, Artificial sequence
  synthetic peptide
VRGMNLTVFGGTVTAFLGIPYAQPPLGRLRF

SEQ ID NO: 14674 - protein, 31 aa, Artificial sequence
  synthetic peptide
RGMNLTVFGGTVTAFLGIPYAQPPLGRLRFK

SEQ ID NO: 14675 - protein, 31 aa, Artificial sequence
  synthetic peptide
GMNLTVFGGTVTAFLGIPYAQPPLGRLRFKK

SEQ ID NO: 14676 - protein, 31 aa, Artificial sequence
  synthetic peptide
MNLTVFGGTVTAFLGIPYAQPPLGRLRFKKP

SEQ ID NO: 14677 - protein, 31 aa, Artificial sequence
  synthetic peptide
NLTVFGGTVTAFLGIPYAQPPLGRLRFKKPQ

SEQ ID NO: 14678 - protein, 31 aa, Artificial sequence
  synthetic peptide
LTVFGGTVTAFLGIPYAQPPLGRLRFKKPQS

SEQ ID NO: 14679 - protein, 31 aa, Artificial sequence
  synthetic peptide
TVFGGTVTAFLGIPYAQPPLGRLRFKKPQSL

SEQ ID NO: 14680 - protein, 31 aa, Artificial sequence
  synthetic peptide
VFGGTVTAFLGIPYAQPPLGRLRFKKPQSLT

SEQ ID NO: 14681 - protein, 31 aa, Artificial sequence
  synthetic peptide
FGGTVTAFLGIPYAQPPLGRLRFKKPQSLTK

SEQ ID NO: 14682 - protein, 31 aa, Artificial sequence
  synthetic peptide
GGTVTAFLGIPYAQPPLGRLRFKKPQSLTKW

SEQ ID NO: 14683 - protein, 31 aa, Artificial sequence
  synthetic peptide
GTVTAFLGIPYAQPPLGRLRFKKPQSLTKWS

SEQ ID NO: 14684 - protein, 31 aa, Artificial sequence
  synthetic peptide
TVTAFLGIPYAQPPLGRLRFKKPQSLTKWSD

SEQ ID NO: 14685 - protein, 31 aa, Artificial sequence
  synthetic peptide
VTAFLGIPYAQPPLGRLRFKKPQSLTKWSDI

SEQ ID NO: 14686 - protein, 31 aa, Artificial sequence
  synthetic peptide
TAFLGIPYAQPPLGRLRFKKPQSLTKWSDIW

SEQ ID NO: 14687 - protein, 31 aa, Artificial sequence
  synthetic peptide
AFLGIPYAQPPLGRLRFKKPQSLTKWSDIWN

SEQ ID NO: 14688 - protein, 31 aa, Artificial sequence
  synthetic peptide
FLGIPYAQPPLGRLRFKKPQSLTKWSDIWNA

SEQ ID NO: 14689 - protein, 31 aa, Artificial sequence
  synthetic peptide
LGIPYAQPPLGRLRFKKPQSLTKWSDIWNAT

SEQ ID NO: 14690 - protein, 31 aa, Artificial sequence
  synthetic peptide
GIPYAQPPLGRLRFKKPQSLTKWSDIWNATK

SEQ ID NO: 14691 - protein, 31 aa, Artificial sequence
  synthetic peptide
IPYAQPPLGRLRFKKPQSLTKWSDIWNATKY

SEQ ID NO: 14692 - protein, 31 aa, Artificial sequence
  synthetic peptide
PYAQPPLGRLRFKKPQSLTKWSDIWNATKYA

SEQ ID NO: 14693 - protein, 31 aa, Artificial sequence
  synthetic peptide
YAQPPLGRLRFKKPQSLTKWSDIWNATKYAN

SEQ ID NO: 14694 - protein, 31 aa, Artificial sequence
  synthetic peptide
AQPPLGRLRFKKPQSLTKWSDIWNATKYANS

SEQ ID NO: 14695 - protein, 31 aa, Artificial sequence
  synthetic peptide
QPPLGRLRFKKPQSLTKWSDIWNATKYANSC

SEQ ID NO: 14696 - protein, 31 aa, Artificial sequence
  synthetic peptide
PPLGRLRFKKPQSLTKWSDIWNATKYANSCC

SEQ ID NO: 14697 - protein, 31 aa, Artificial sequence
  synthetic peptide
PLGRLRFKKPQSLTKWSDIWNATKYANSCCQ

SEQ ID NO: 14698 - protein, 31 aa, Artificial sequence
  synthetic peptide
LGRLRFKKPQSLTKWSDIWNATKYANSCCQN

SEQ ID NO: 14699 - protein, 31 aa, Artificial sequence
  synthetic peptide
GRLRFKKPQSLTKWSDIWNATKYANSCCQNI

SEQ ID NO: 14700 - protein, 31 aa, Artificial sequence
  synthetic peptide
RLRFKKPQSLTKWSDIWNATKYANSCCQNID

SEQ ID NO: 14701 - protein, 31 aa, Artificial sequence
  synthetic peptide
LRFKKPQSLTKWSDIWNATKYANSCCQNIDQ

SEQ ID NO: 14702 - protein, 31 aa, Artificial sequence
  synthetic peptide
RFKKPQSLTKWSDIWNATKYANSCCQNIDQS

SEQ ID NO: 14703 - protein, 31 aa, Artificial sequence
  synthetic peptide
FKKPQSLTKWSDIWNATKYANSCCQNIDQSF

SEQ ID NO: 14704 - protein, 31 aa, Artificial sequence
  synthetic peptide
KKPQSLTKWSDIWNATKYANSCCQNIDQSFP

SEQ ID NO: 14705 - protein, 31 aa, Artificial sequence
  synthetic peptide
KPQSLTKWSDIWNATKYANSCCQNIDQSFPG

SEQ ID NO: 14706 - protein, 31 aa, Artificial sequence
  synthetic peptide
PQSLTKWSDIWNATKYANSCCQNIDQSFPGF

SEQ ID NO: 14707 - protein, 31 aa, Artificial sequence
  synthetic peptide
QSLTKWSDIWNATKYANSCCQNIDQSFPGFH

SEQ ID NO: 14708 - protein, 31 aa, Artificial sequence
  synthetic peptide
SLTKWSDIWNATKYANSCCQNIDQSFPGFHG

SEQ ID NO: 14709 - protein, 31 aa, Artificial sequence
  synthetic peptide
LTKWSDIWNATKYANSCCQNIDQSFPGFHGS

SEQ ID NO: 14710 - protein, 31 aa, Artificial sequence
  synthetic peptide
TKWSDIWNATKYANSCCQNIDQSFPGFHGSE

SEQ ID NO: 14711 - protein, 31 aa, Artificial sequence
  synthetic peptide
KWSDIWNATKYANSCCQNIDQSFPGFHGSEM

SEQ ID NO: 14712 - protein, 31 aa, Artificial sequence
  synthetic peptide
WSDIWNATKYANSCCQNIDQSFPGFHGSEMW

SEQ ID NO: 14713 - protein, 31 aa, Artificial sequence
  synthetic peptide
SDIWNATKYANSCCQNIDQSFPGFHGSEMWN

SEQ ID NO: 14714 - protein, 31 aa, Artificial sequence
  synthetic peptide
DIWNATKYANSCCQNIDQSFPGFHGSEMWNP

SEQ ID NO: 14715 - protein, 31 aa, Artificial sequence
  synthetic peptide
IWNATKYANSCCQNIDQSFPGFHGSEMWNPN

SEQ ID NO: 14716 - protein, 31 aa, Artificial sequence
  synthetic peptide
WNATKYANSCCQNIDQSFPGFHGSEMWNPNT

SEQ ID NO: 14717 - protein, 31 aa, Artificial sequence
  synthetic peptide
NATKYANSCCQNIDQSFPGFHGSEMWNPNTD

SEQ ID NO: 14718 - protein, 31 aa, Artificial sequence
  synthetic peptide
ATKYANSCCQNIDQSFPGFHGSEMWNPNTDL

SEQ ID NO: 14719 - protein, 31 aa, Artificial sequence
  synthetic peptide
TKYANSCCQNIDQSFPGFHGSEMWNPNTDLS

SEQ ID NO: 14720 - protein, 31 aa, Artificial sequence
  synthetic peptide
KYANSCCQNIDQSFPGFHGSEMWNPNTDLSE

SEQ ID NO: 14721 - protein, 31 aa, Artificial sequence
  synthetic peptide
YANSCCQNIDQSFPGFHGSEMWNPNTDLSED

SEQ ID NO: 14722 - protein, 31 aa, Artificial sequence
  synthetic peptide
ANSCCQNIDQSFPGFHGSEMWNPNTDLSEDC

SEQ ID NO: 14723 - protein, 31 aa, Artificial sequence
  synthetic peptide
NSCCQNIDQSFPGFHGSEMWNPNTDLSEDCL

SEQ ID NO: 14724 - protein, 31 aa, Artificial sequence
  synthetic peptide
SCCQNIDQSFPGFHGSEMWNPNTDLSEDCLY

SEQ ID NO: 14725 - protein, 31 aa, Artificial sequence
  synthetic peptide
CCQNIDQSFPGFHGSEMWNPNTDLSEDCLYL

SEQ ID NO: 14726 - protein, 31 aa, Artificial sequence
  synthetic peptide
CQNIDQSFPGFHGSEMWNPNTDLSEDCLYLN

SEQ ID NO: 14727 - protein, 31 aa, Artificial sequence
  synthetic peptide
QNIDQSFPGFHGSEMWNPNTDLSEDCLYLNV

SEQ ID NO: 14728 - protein, 31 aa, Artificial sequence
  synthetic peptide
NIDQSFPGFHGSEMWNPNTDLSEDCLYLNVW

SEQ ID NO: 14729 - protein, 31 aa, Artificial sequence
  synthetic peptide
IDQSFPGFHGSEMWNPNTDLSEDCLYLNVWI

SEQ ID NO: 14730 - protein, 31 aa, Artificial sequence
  synthetic peptide
DQSFPGFHGSEMWNPNTDLSEDCLYLNVWIP

SEQ ID NO: 14731 - protein, 31 aa, Artificial sequence
  synthetic peptide
QSFPGFHGSEMWNPNTDLSEDCLYLNVWIPA

SEQ ID NO: 14732 - protein, 31 aa, Artificial sequence
  synthetic peptide
SFPGFHGSEMWNPNTDLSEDCLYLNVWIPAP

SEQ ID NO: 14733 - protein, 31 aa, Artificial sequence
  synthetic peptide
FPGFHGSEMWNPNTDLSEDCLYLNVWIPAPK

SEQ ID NO: 14734 - protein, 31 aa, Artificial sequence
  synthetic peptide
PGFHGSEMWNPNTDLSEDCLYLNVWIPAPKP

SEQ ID NO: 14735 - protein, 31 aa, Artificial sequence
  synthetic peptide
GFHGSEMWNPNTDLSEDCLYLNVWIPAPKPK

SEQ ID NO: 14736 - protein, 31 aa, Artificial sequence
  synthetic peptide
FHGSEMWNPNTDLSEDCLYLNVWIPAPKPKN

SEQ ID NO: 14737 - protein, 31 aa, Artificial sequence
  synthetic peptide
HGSEMWNPNTDLSEDCLYLNVWIPAPKPKNA

SEQ ID NO: 14738 - protein, 31 aa, Artificial sequence
  synthetic peptide
GSEMWNPNTDLSEDCLYLNVWIPAPKPKNAT

SEQ ID NO: 14739 - protein, 31 aa, Artificial sequence
  synthetic peptide
SEMWNPNTDLSEDCLYLNVWIPAPKPKNATV

SEQ ID NO: 14740 - protein, 31 aa, Artificial sequence
  synthetic peptide
EMWNPNTDLSEDCLYLNVWIPAPKPKNATVL

SEQ ID NO: 14741 - protein, 31 aa, Artificial sequence
  synthetic peptide
MWNPNTDLSEDCLYLNVWIPAPKPKNATVLI

SEQ ID NO: 14742 - protein, 31 aa, Artificial sequence
  synthetic peptide
WNPNTDLSEDCLYLNVWIPAPKPKNATVLIW

SEQ ID NO: 14743 - protein, 31 aa, Artificial sequence
  synthetic peptide
NPNTDLSEDCLYLNVWIPAPKPKNATVLIWI

SEQ ID NO: 14744 - protein, 31 aa, Artificial sequence
  synthetic peptide
PNTDLSEDCLYLNVWIPAPKPKNATVLIWIY

SEQ ID NO: 14745 - protein, 31 aa, Artificial sequence
  synthetic peptide
NTDLSEDCLYLNVWIPAPKPKNATVLIWIYG

SEQ ID NO: 14746 - protein, 31 aa, Artificial sequence
  synthetic peptide
TDLSEDCLYLNVWIPAPKPKNATVLIWIYGG

SEQ ID NO: 14747 - protein, 31 aa, Artificial sequence
  synthetic peptide
DLSEDCLYLNVWIPAPKPKNATVLIWIYGGG

SEQ ID NO: 14748 - protein, 31 aa, Artificial sequence
  synthetic peptide
LSEDCLYLNVWIPAPKPKNATVLIWIYGGGF

SEQ ID NO: 14749 - protein, 31 aa, Artificial sequence
  synthetic peptide
SEDCLYLNVWIPAPKPKNATVLIWIYGGGFQ

SEQ ID NO: 14750 - protein, 31 aa, Artificial sequence
  synthetic peptide
EDCLYLNVWIPAPKPKNATVLIWIYGGGFQT

SEQ ID NO: 14751 - protein, 31 aa, Artificial sequence
  synthetic peptide
DCLYLNVWIPAPKPKNATVLIWIYGGGFQTG

SEQ ID NO: 14752 - protein, 31 aa, Artificial sequence
  synthetic peptide
CLYLNVWIPAPKPKNATVLIWIYGGGFQTGT

SEQ ID NO: 14753 - protein, 31 aa, Artificial sequence
  synthetic peptide
LYLNVWIPAPKPKNATVLIWIYGGGFQTGTS

SEQ ID NO: 14754 - protein, 31 aa, Artificial sequence
  synthetic peptide
YLNVWIPAPKPKNATVLIWIYGGGFQTGTSS

SEQ ID NO: 14755 - protein, 31 aa, Artificial sequence
  synthetic peptide
LNVWIPAPKPKNATVLIWIYGGGFQTGTSSL

SEQ ID NO: 14756 - protein, 31 aa, Artificial sequence
  synthetic peptide
NVWIPAPKPKNATVLIWIYGGGFQTGTSSLH

SEQ ID NO: 14757 - protein, 31 aa, Artificial sequence
  synthetic peptide
VWIPAPKPKNATVLIWIYGGGFQTGTSSLHV

SEQ ID NO: 14758 - protein, 31 aa, Artificial sequence
  synthetic peptide
WIPAPKPKNATVLIWIYGGGFQTGTSSLHVY

SEQ ID NO: 14759 - protein, 31 aa, Artificial sequence
  synthetic peptide
IPAPKPKNATVLIWIYGGGFQTGTSSLHVYD

SEQ ID NO: 14760 - protein, 31 aa, Artificial sequence
  synthetic peptide
PAPKPKNATVLIWIYGGGFQTGTSSLHVYDG

SEQ ID NO: 14761 - protein, 31 aa, Artificial sequence
  synthetic peptide
APKPKNATVLIWIYGGGFQTGTSSLHVYDGK

SEQ ID NO: 14762 - protein, 31 aa, Artificial sequence
  synthetic peptide
PKPKNATVLIWIYGGGFQTGTSSLHVYDGKF

SEQ ID NO: 14763 - protein, 31 aa, Artificial sequence
  synthetic peptide
KPKNATVLIWIYGGGFQTGTSSLHVYDGKFL

SEQ ID NO: 14764 - protein, 31 aa, Artificial sequence
  synthetic peptide
PKNATVLIWIYGGGFQTGTSSLHVYDGKFLA

SEQ ID NO: 14765 - protein, 31 aa, Artificial sequence
  synthetic peptide
KNATVLIWIYGGGFQTGTSSLHVYDGKFLAR

SEQ ID NO: 14766 - protein, 31 aa, Artificial sequence
  synthetic peptide
NATVLIWIYGGGFQTGTSSLHVYDGKFLARV

SEQ ID NO: 14767 - protein, 31 aa, Artificial sequence
  synthetic peptide
ATVLIWIYGGGFQTGTSSLHVYDGKFLARVE

SEQ ID NO: 14768 - protein, 31 aa, Artificial sequence
  synthetic peptide
TVLIWIYGGGFQTGTSSLHVYDGKFLARVER

SEQ ID NO: 14769 - protein, 31 aa, Artificial sequence
  synthetic peptide
VLIWIYGGGFQTGTSSLHVYDGKFLARVERV

SEQ ID NO: 14770 - protein, 31 aa, Artificial sequence
  synthetic peptide
LIWIYGGGFQTGTSSLHVYDGKFLARVERVI

SEQ ID NO: 14771 - protein, 31 aa, Artificial sequence
  synthetic peptide
IWIYGGGFQTGTSSLHVYDGKFLARVERVIV

SEQ ID NO: 14772 - protein, 31 aa, Artificial sequence
  synthetic peptide
WIYGGGFQTGTSSLHVYDGKFLARVERVIVV

SEQ ID NO: 14773 - protein, 31 aa, Artificial sequence
  synthetic peptide
IYGGGFQTGTSSLHVYDGKFLARVERVIVVS

SEQ ID NO: 14774 - protein, 31 aa, Artificial sequence
  synthetic peptide
YGGGFQTGTSSLHVYDGKFLARVERVIVVSM

SEQ ID NO: 14775 - protein, 31 aa, Artificial sequence
  synthetic peptide
GGGFQTGTSSLHVYDGKFLARVERVIVVSMN

SEQ ID NO: 14776 - protein, 31 aa, Artificial sequence
  synthetic peptide
GGFQTGTSSLHVYDGKFLARVERVIVVSMNY

SEQ ID NO: 14777 - protein, 31 aa, Artificial sequence
  synthetic peptide
GFQTGTSSLHVYDGKFLARVERVIVVSMNYR

SEQ ID NO: 14778 - protein, 31 aa, Artificial sequence
  synthetic peptide
FQTGTSSLHVYDGKFLARVERVIVVSMNYRV

SEQ ID NO: 14779 - protein, 31 aa, Artificial sequence
  synthetic peptide
QTGTSSLHVYDGKFLARVERVIVVSMNYRVG

SEQ ID NO: 14780 - protein, 31 aa, Artificial sequence
  synthetic peptide
TGTSSLHVYDGKFLARVERVIVVSMNYRVGA

SEQ ID NO: 14781 - protein, 31 aa, Artificial sequence
  synthetic peptide
GTSSLHVYDGKFLARVERVIVVSMNYRVGAL

SEQ ID NO: 14782 - protein, 31 aa, Artificial sequence
  synthetic peptide
TSSLHVYDGKFLARVERVIVVSMNYRVGALG

SEQ ID NO: 14783 - protein, 31 aa, Artificial sequence
  synthetic peptide
SSLHVYDGKFLARVERVIVVSMNYRVGALGF

SEQ ID NO: 14784 - protein, 31 aa, Artificial sequence
  synthetic peptide
SLHVYDGKFLARVERVIVVSMNYRVGALGFL

SEQ ID NO: 14785 - protein, 31 aa, Artificial sequence
  synthetic peptide
LHVYDGKFLARVERVIVVSMNYRVGALGFLA

SEQ ID NO: 14786 - protein, 31 aa, Artificial sequence
  synthetic peptide
HVYDGKFLARVERVIVVSMNYRVGALGFLAL

SEQ ID NO: 14787 - protein, 31 aa, Artificial sequence
  synthetic peptide
VYDGKFLARVERVIVVSMNYRVGALGFLALP

SEQ ID NO: 14788 - protein, 31 aa, Artificial sequence
  synthetic peptide
YDGKFLARVERVIVVSMNYRVGALGFLALPG

SEQ ID NO: 14789 - protein, 31 aa, Artificial sequence
  synthetic peptide
DGKFLARVERVIVVSMNYRVGALGFLALPGN

SEQ ID NO: 14790 - protein, 31 aa, Artificial sequence
  synthetic peptide
GKFLARVERVIVVSMNYRVGALGFLALPGNP

SEQ ID NO: 14791 - protein, 31 aa, Artificial sequence
  synthetic peptide
KFLARVERVIVVSMNYRVGALGFLALPGNPE

SEQ ID NO: 14792 - protein, 31 aa, Artificial sequence
  synthetic peptide
FLARVERVIVVSMNYRVGALGFLALPGNPEA

SEQ ID NO: 14793 - protein, 31 aa, Artificial sequence
  synthetic peptide
LARVERVIVVSMNYRVGALGFLALPGNPEAP

SEQ ID NO: 14794 - protein, 31 aa, Artificial sequence
  synthetic peptide
ARVERVIVVSMNYRVGALGFLALPGNPEAPG

SEQ ID NO: 14795 - protein, 31 aa, Artificial sequence
  synthetic peptide
RVERVIVVSMNYRVGALGFLALPGNPEAPGN

SEQ ID NO: 14796 - protein, 31 aa, Artificial sequence
  synthetic peptide
VERVIVVSMNYRVGALGFLALPGNPEAPGNM

SEQ ID NO: 14797 - protein, 31 aa, Artificial sequence
  synthetic peptide
ERVIVVSMNYRVGALGFLALPGNPEAPGNMG

SEQ ID NO: 14798 - protein, 31 aa, Artificial sequence
  synthetic peptide
RVIVVSMNYRVGALGFLALPGNPEAPGNMGL

SEQ ID NO: 14799 - protein, 31 aa, Artificial sequence
  synthetic peptide
VIVVSMNYRVGALGFLALPGNPEAPGNMGLF

SEQ ID NO: 14800 - protein, 31 aa, Artificial sequence
  synthetic peptide
IVVSMNYRVGALGFLALPGNPEAPGNMGLFD

SEQ ID NO: 14801 - protein, 31 aa, Artificial sequence
  synthetic peptide
VVSMNYRVGALGFLALPGNPEAPGNMGLFDQ

SEQ ID NO: 14802 - protein, 31 aa, Artificial sequence
  synthetic peptide
VSMNYRVGALGFLALPGNPEAPGNMGLFDQQ

SEQ ID NO: 14803 - protein, 31 aa, Artificial sequence
  synthetic peptide
SMNYRVGALGFLALPGNPEAPGNMGLFDQQL

SEQ ID NO: 14804 - protein, 31 aa, Artificial sequence
  synthetic peptide
MNYRVGALGFLALPGNPEAPGNMGLFDQQLA

SEQ ID NO: 14805 - protein, 31 aa, Artificial sequence
  synthetic peptide
NYRVGALGFLALPGNPEAPGNMGLFDQQLAL

SEQ ID NO: 14806 - protein, 31 aa, Artificial sequence
  synthetic peptide
YRVGALGFLALPGNPEAPGNMGLFDQQLALQ

SEQ ID NO: 14807 - protein, 31 aa, Artificial sequence
  synthetic peptide
RVGALGFLALPGNPEAPGNMGLFDQQLALQW

SEQ ID NO: 14808 - protein, 31 aa, Artificial sequence
  synthetic peptide
VGALGFLALPGNPEAPGNMGLFDQQLALQWV

SEQ ID NO: 14809 - protein, 31 aa, Artificial sequence
  synthetic peptide
GALGFLALPGNPEAPGNMGLFDQQLALQWVQ

SEQ ID NO: 14810 - protein, 31 aa, Artificial sequence
  synthetic peptide
ALGFLALPGNPEAPGNMGLFDQQLALQWVQK

SEQ ID NO: 14811 - protein, 31 aa, Artificial sequence
  synthetic peptide
LGFLALPGNPEAPGNMGLFDQQLALQWVQKN

SEQ ID NO: 14812 - protein, 31 aa, Artificial sequence
  synthetic peptide
GFLALPGNPEAPGNMGLFDQQLALQWVQKNI

SEQ ID NO: 14813 - protein, 31 aa, Artificial sequence
  synthetic peptide
FLALPGNPEAPGNMGLFDQQLALQWVQKNIA

SEQ ID NO: 14814 - protein, 31 aa, Artificial sequence
  synthetic peptide
LALPGNPEAPGNMGLFDQQLALQWVQKNIAA

SEQ ID NO: 14815 - protein, 31 aa, Artificial sequence
  synthetic peptide
ALPGNPEAPGNMGLFDQQLALQWVQKNIAAF

SEQ ID NO: 14816 - protein, 31 aa, Artificial sequence
  synthetic peptide
LPGNPEAPGNMGLFDQQLALQWVQKNIAAFG

SEQ ID NO: 14817 - protein, 31 aa, Artificial sequence
  synthetic peptide
PGNPEAPGNMGLFDQQLALQWVQKNIAAFGG

SEQ ID NO: 14818 - protein, 31 aa, Artificial sequence
  synthetic peptide
GNPEAPGNMGLFDQQLALQWVQKNIAAFGGN

SEQ ID NO: 14819 - protein, 31 aa, Artificial sequence
  synthetic peptide
NPEAPGNMGLFDQQLALQWVQKNIAAFGGNP

SEQ ID NO: 14820 - protein, 31 aa, Artificial sequence
  synthetic peptide
PEAPGNMGLFDQQLALQWVQKNIAAFGGNPK

SEQ ID NO: 14821 - protein, 31 aa, Artificial sequence
  synthetic peptide
EAPGNMGLFDQQLALQWVQKNIAAFGGNPKS

SEQ ID NO: 14822 - protein, 31 aa, Artificial sequence
  synthetic peptide
APGNMGLFDQQLALQWVQKNIAAFGGNPKSV

SEQ ID NO: 14823 - protein, 31 aa, Artificial sequence
  synthetic peptide
PGNMGLFDQQLALQWVQKNIAAFGGNPKSVT

SEQ ID NO: 14824 - protein, 31 aa, Artificial sequence
  synthetic peptide
GNMGLFDQQLALQWVQKNIAAFGGNPKSVTL

SEQ ID NO: 14825 - protein, 31 aa, Artificial sequence
  synthetic peptide
NMGLFDQQLALQWVQKNIAAFGGNPKSVTLF

SEQ ID NO: 14826 - protein, 31 aa, Artificial sequence
  synthetic peptide
MGLFDQQLALQWVQKNIAAFGGNPKSVTLFG

SEQ ID NO: 14827 - protein, 31 aa, Artificial sequence
  synthetic peptide
GLFDQQLALQWVQKNIAAFGGNPKSVTLFGE

SEQ ID NO: 14828 - protein, 31 aa, Artificial sequence
  synthetic peptide
LFDQQLALQWVQKNIAAFGGNPKSVTLFGES

SEQ ID NO: 14829 - protein, 31 aa, Artificial sequence
  synthetic peptide
FDQQLALQWVQKNIAAFGGNPKSVTLFGESA

SEQ ID NO: 14830 - protein, 31 aa, Artificial sequence
  synthetic peptide
DQQLALQWVQKNIAAFGGNPKSVTLFGESAG

SEQ ID NO: 14831 - protein, 31 aa, Artificial sequence
  synthetic peptide
QQLALQWVQKNIAAFGGNPKSVTLFGESAGA

SEQ ID NO: 14832 - protein, 31 aa, Artificial sequence
  synthetic peptide
QLALQWVQKNIAAFGGNPKSVTLFGESAGAA

SEQ ID NO: 14833 - protein, 31 aa, Artificial sequence
  synthetic peptide
LALQWVQKNIAAFGGNPKSVTLFGESAGAAS

SEQ ID NO: 14834 - protein, 31 aa, Artificial sequence
  synthetic peptide
ALQWVQKNIAAFGGNPKSVTLFGESAGAASV

SEQ ID NO: 14835 - protein, 31 aa, Artificial sequence
  synthetic peptide
LQWVQKNIAAFGGNPKSVTLFGESAGAASVS

SEQ ID NO: 14836 - protein, 31 aa, Artificial sequence
  synthetic peptide
QWVQKNIAAFGGNPKSVTLFGESAGAASVSL

SEQ ID NO: 14837 - protein, 31 aa, Artificial sequence
  synthetic peptide
WVQKNIAAFGGNPKSVTLFGESAGAASVSLH

SEQ ID NO: 14838 - protein, 31 aa, Artificial sequence
  synthetic peptide
VQKNIAAFGGNPKSVTLFGESAGAASVSLHL

SEQ ID NO: 14839 - protein, 31 aa, Artificial sequence
  synthetic peptide
QKNIAAFGGNPKSVTLFGESAGAASVSLHLL

SEQ ID NO: 14840 - protein, 31 aa, Artificial sequence
  synthetic peptide
KNIAAFGGNPKSVTLFGESAGAASVSLHLLS

SEQ ID NO: 14841 - protein, 31 aa, Artificial sequence
  synthetic peptide
NIAAFGGNPKSVTLFGESAGAASVSLHLLSP

SEQ ID NO: 14842 - protein, 31 aa, Artificial sequence
  synthetic peptide
IAAFGGNPKSVTLFGESAGAASVSLHLLSPG

SEQ ID NO: 14843 - protein, 31 aa, Artificial sequence
  synthetic peptide
AAFGGNPKSVTLFGESAGAASVSLHLLSPGS

SEQ ID NO: 14844 - protein, 31 aa, Artificial sequence
  synthetic peptide
AFGGNPKSVTLFGESAGAASVSLHLLSPGSH

SEQ ID NO: 14845 - protein, 31 aa, Artificial sequence
  synthetic peptide
FGGNPKSVTLFGESAGAASVSLHLLSPGSHS

SEQ ID NO: 14846 - protein, 31 aa, Artificial sequence
  synthetic peptide
GGNPKSVTLFGESAGAASVSLHLLSPGSHSL

SEQ ID NO: 14847 - protein, 31 aa, Artificial sequence
  synthetic peptide
GNPKSVTLFGESAGAASVSLHLLSPGSHSLF

SEQ ID NO: 14848 - protein, 31 aa, Artificial sequence
  synthetic peptide
NPKSVTLFGESAGAASVSLHLLSPGSHSLFT

SEQ ID NO: 14849 - protein, 31 aa, Artificial sequence
  synthetic peptide
PKSVTLFGESAGAASVSLHLLSPGSHSLFTR

SEQ ID NO: 14850 - protein, 31 aa, Artificial sequence
  synthetic peptide
KSVTLFGESAGAASVSLHLLSPGSHSLFTRA

SEQ ID NO: 14851 - protein, 31 aa, Artificial sequence
  synthetic peptide
SVTLFGESAGAASVSLHLLSPGSHSLFTRAI

SEQ ID NO: 14852 - protein, 31 aa, Artificial sequence
  synthetic peptide
VTLFGESAGAASVSLHLLSPGSHSLFTRAIL

SEQ ID NO: 14853 - protein, 31 aa, Artificial sequence
  synthetic peptide
TLFGESAGAASVSLHLLSPGSHSLFTRAILQ

SEQ ID NO: 14854 - protein, 31 aa, Artificial sequence
  synthetic peptide
LFGESAGAASVSLHLLSPGSHSLFTRAILQS

SEQ ID NO: 14855 - protein, 31 aa, Artificial sequence
  synthetic peptide
FGESAGAASVSLHLLSPGSHSLFTRAILQSG

SEQ ID NO: 14856 - protein, 31 aa, Artificial sequence
  synthetic peptide
GESAGAASVSLHLLSPGSHSLFTRAILQSGS

SEQ ID NO: 14857 - protein, 31 aa, Artificial sequence
  synthetic peptide
ESAGAASVSLHLLSPGSHSLFTRAILQSGSF

SEQ ID NO: 14858 - protein, 31 aa, Artificial sequence
  synthetic peptide
SAGAASVSLHLLSPGSHSLFTRAILQSGSFN

SEQ ID NO: 14859 - protein, 31 aa, Artificial sequence
  synthetic peptide
AGAASVSLHLLSPGSHSLFTRAILQSGSFNA

SEQ ID NO: 14860 - protein, 31 aa, Artificial sequence
  synthetic peptide
GAASVSLHLLSPGSHSLFTRAILQSGSFNAP

SEQ ID NO: 14861 - protein, 31 aa, Artificial sequence
  synthetic peptide
AASVSLHLLSPGSHSLFTRAILQSGSFNAPW

SEQ ID NO: 14862 - protein, 31 aa, Artificial sequence
  synthetic peptide
ASVSLHLLSPGSHSLFTRAILQSGSFNAPWA

SEQ ID NO: 14863 - protein, 31 aa, Artificial sequence
  synthetic peptide
SVSLHLLSPGSHSLFTRAILQSGSFNAPWAV

SEQ ID NO: 14864 - protein, 31 aa, Artificial sequence
  synthetic peptide
VSLHLLSPGSHSLFTRAILQSGSFNAPWAVT

SEQ ID NO: 14865 - protein, 31 aa, Artificial sequence
  synthetic peptide
SLHLLSPGSHSLFTRAILQSGSFNAPWAVTS

SEQ ID NO: 14866 - protein, 31 aa, Artificial sequence
  synthetic peptide
LHLLSPGSHSLFTRAILQSGSFNAPWAVTSL

SEQ ID NO: 14867 - protein, 31 aa, Artificial sequence
  synthetic peptide
HLLSPGSHSLFTRAILQSGSFNAPWAVTSLY

SEQ ID NO: 14868 - protein, 31 aa, Artificial sequence
  synthetic peptide
LLSPGSHSLFTRAILQSGSFNAPWAVTSLYE

SEQ ID NO: 14869 - protein, 31 aa, Artificial sequence
  synthetic peptide
LSPGSHSLFTRAILQSGSFNAPWAVTSLYEA

SEQ ID NO: 14870 - protein, 31 aa, Artificial sequence
  synthetic peptide
SPGSHSLFTRAILQSGSFNAPWAVTSLYEAR

SEQ ID NO: 14871 - protein, 31 aa, Artificial sequence
  synthetic peptide
PGSHSLFTRAILQSGSFNAPWAVTSLYEARN

SEQ ID NO: 14872 - protein, 31 aa, Artificial sequence
  synthetic peptide
GSHSLFTRAILQSGSFNAPWAVTSLYEARNR

SEQ ID NO: 14873 - protein, 31 aa, Artificial sequence
  synthetic peptide
SHSLFTRAILQSGSFNAPWAVTSLYEARNRT

SEQ ID NO: 14874 - protein, 31 aa, Artificial sequence
  synthetic peptide
HSLFTRAILQSGSFNAPWAVTSLYEARNRTL

SEQ ID NO: 14875 - protein, 31 aa, Artificial sequence
  synthetic peptide
SLFTRAILQSGSFNAPWAVTSLYEARNRTLN

SEQ ID NO: 14876 - protein, 31 aa, Artificial sequence
  synthetic peptide
LFTRAILQSGSFNAPWAVTSLYEARNRTLNL

SEQ ID NO: 14877 - protein, 31 aa, Artificial sequence
  synthetic peptide
FTRAILQSGSFNAPWAVTSLYEARNRTLNLA

SEQ ID NO: 14878 - protein, 31 aa, Artificial sequence
  synthetic peptide
TRAILQSGSFNAPWAVTSLYEARNRTLNLAK

SEQ ID NO: 14879 - protein, 31 aa, Artificial sequence
  synthetic peptide
RAILQSGSFNAPWAVTSLYEARNRTLNLAKL

SEQ ID NO: 14880 - protein, 31 aa, Artificial sequence
  synthetic peptide
AILQSGSFNAPWAVTSLYEARNRTLNLAKLT

SEQ ID NO: 14881 - protein, 31 aa, Artificial sequence
  synthetic peptide
ILQSGSFNAPWAVTSLYEARNRTLNLAKLTG

SEQ ID NO: 14882 - protein, 31 aa, Artificial sequence
  synthetic peptide
LQSGSFNAPWAVTSLYEARNRTLNLAKLTGC

SEQ ID NO: 14883 - protein, 31 aa, Artificial sequence
  synthetic peptide
QSGSFNAPWAVTSLYEARNRTLNLAKLTGCS

SEQ ID NO: 14884 - protein, 31 aa, Artificial sequence
  synthetic peptide
SGSFNAPWAVTSLYEARNRTLNLAKLTGCSR

SEQ ID NO: 14885 - protein, 31 aa, Artificial sequence
  synthetic peptide
GSFNAPWAVTSLYEARNRTLNLAKLTGCSRE

SEQ ID NO: 14886 - protein, 31 aa, Artificial sequence
  synthetic peptide
SFNAPWAVTSLYEARNRTLNLAKLTGCSREN

SEQ ID NO: 14887 - protein, 31 aa, Artificial sequence
  synthetic peptide
FNAPWAVTSLYEARNRTLNLAKLTGCSRENE

SEQ ID NO: 14888 - protein, 31 aa, Artificial sequence
  synthetic peptide
NAPWAVTSLYEARNRTLNLAKLTGCSRENET

SEQ ID NO: 14889 - protein, 31 aa, Artificial sequence
  synthetic peptide
APWAVTSLYEARNRTLNLAKLTGCSRENETE

SEQ ID NO: 14890 - protein, 31 aa, Artificial sequence
  synthetic peptide
PWAVTSLYEARNRTLNLAKLTGCSRENETEI

SEQ ID NO: 14891 - protein, 31 aa, Artificial sequence
  synthetic peptide
WAVTSLYEARNRTLNLAKLTGCSRENETEII

SEQ ID NO: 14892 - protein, 31 aa, Artificial sequence
  synthetic peptide
AVTSLYEARNRTLNLAKLTGCSRENETEIIK

SEQ ID NO: 14893 - protein, 31 aa, Artificial sequence
  synthetic peptide
VTSLYEARNRTLNLAKLTGCSRENETEIIKC

SEQ ID NO: 14894 - protein, 31 aa, Artificial sequence
  synthetic peptide
TSLYEARNRTLNLAKLTGCSRENETEIIKCL

SEQ ID NO: 14895 - protein, 31 aa, Artificial sequence
  synthetic peptide
SLYEARNRTLNLAKLTGCSRENETEIIKCLR

SEQ ID NO: 14896 - protein, 31 aa, Artificial sequence
  synthetic peptide
LYEARNRTLNLAKLTGCSRENETEIIKCLRN

SEQ ID NO: 14897 - protein, 31 aa, Artificial sequence
  synthetic peptide
YEARNRTLNLAKLTGCSRENETEIIKCLRNK

SEQ ID NO: 14898 - protein, 31 aa, Artificial sequence
  synthetic peptide
EARNRTLNLAKLTGCSRENETEIIKCLRNKD

SEQ ID NO: 14899 - protein, 31 aa, Artificial sequence
  synthetic peptide
ARNRTLNLAKLTGCSRENETEIIKCLRNKDP

SEQ ID NO: 14900 - protein, 31 aa, Artificial sequence
  synthetic peptide
RNRTLNLAKLTGCSRENETEIIKCLRNKDPQ

SEQ ID NO: 14901 - protein, 31 aa, Artificial sequence
  synthetic peptide
NRTLNLAKLTGCSRENETEIIKCLRNKDPQE

SEQ ID NO: 14902 - protein, 31 aa, Artificial sequence
  synthetic peptide
RTLNLAKLTGCSRENETEIIKCLRNKDPQEI

SEQ ID NO: 14903 - protein, 31 aa, Artificial sequence
  synthetic peptide
TLNLAKLTGCSRENETEIIKCLRNKDPQEIL

SEQ ID NO: 14904 - protein, 31 aa, Artificial sequence
  synthetic peptide
LNLAKLTGCSRENETEIIKCLRNKDPQEILL

SEQ ID NO: 14905 - protein, 31 aa, Artificial sequence
  synthetic peptide
NLAKLTGCSRENETEIIKCLRNKDPQEILLN

SEQ ID NO: 14906 - protein, 31 aa, Artificial sequence
  synthetic peptide
LAKLTGCSRENETEIIKCLRNKDPQEILLNE

SEQ ID NO: 14907 - protein, 31 aa, Artificial sequence
  synthetic peptide
AKLTGCSRENETEIIKCLRNKDPQEILLNEA

SEQ ID NO: 14908 - protein, 31 aa, Artificial sequence
  synthetic peptide
KLTGCSRENETEIIKCLRNKDPQEILLNEAF

SEQ ID NO: 14909 - protein, 31 aa, Artificial sequence
  synthetic peptide
LTGCSRENETEIIKCLRNKDPQEILLNEAFV

SEQ ID NO: 14910 - protein, 31 aa, Artificial sequence
  synthetic peptide
TGCSRENETEIIKCLRNKDPQEILLNEAFVV

SEQ ID NO: 14911 - protein, 31 aa, Artificial sequence
  synthetic peptide
GCSRENETEIIKCLRNKDPQEILLNEAFVVP

SEQ ID NO: 14912 - protein, 31 aa, Artificial sequence
  synthetic peptide
CSRENETEIIKCLRNKDPQEILLNEAFVVPY

SEQ ID NO: 14913 - protein, 31 aa, Artificial sequence
  synthetic peptide
SRENETEIIKCLRNKDPQEILLNEAFVVPYG

SEQ ID NO: 14914 - protein, 31 aa, Artificial sequence
  synthetic peptide
RENETEIIKCLRNKDPQEILLNEAFVVPYGT

SEQ ID NO: 14915 - protein, 31 aa, Artificial sequence
  synthetic peptide
ENETEIIKCLRNKDPQEILLNEAFVVPYGTP

SEQ ID NO: 14916 - protein, 31 aa, Artificial sequence
  synthetic peptide
NETEIIKCLRNKDPQEILLNEAFVVPYGTPL

SEQ ID NO: 14917 - protein, 31 aa, Artificial sequence
  synthetic peptide
ETEIIKCLRNKDPQEILLNEAFVVPYGTPLS

SEQ ID NO: 14918 - protein, 31 aa, Artificial sequence
  synthetic peptide
TEIIKCLRNKDPQEILLNEAFVVPYGTPLSV

SEQ ID NO: 14919 - protein, 31 aa, Artificial sequence
  synthetic peptide
EIIKCLRNKDPQEILLNEAFVVPYGTPLSVN

SEQ ID NO: 14920 - protein, 31 aa, Artificial sequence
  synthetic peptide
IIKCLRNKDPQEILLNEAFVVPYGTPLSVNF

SEQ ID NO: 14921 - protein, 31 aa, Artificial sequence
  synthetic peptide
IKCLRNKDPQEILLNEAFVVPYGTPLSVNFG

SEQ ID NO: 14922 - protein, 31 aa, Artificial sequence
  synthetic peptide
KCLRNKDPQEILLNEAFVVPYGTPLSVNFGP

SEQ ID NO: 14923 - protein, 31 aa, Artificial sequence
  synthetic peptide
CLRNKDPQEILLNEAFVVPYGTPLSVNFGPT

SEQ ID NO: 14924 - protein, 31 aa, Artificial sequence
  synthetic peptide
LRNKDPQEILLNEAFVVPYGTPLSVNFGPTV

SEQ ID NO: 14925 - protein, 31 aa, Artificial sequence
  synthetic peptide
RNKDPQEILLNEAFVVPYGTPLSVNFGPTVD

SEQ ID NO: 14926 - protein, 31 aa, Artificial sequence
  synthetic peptide
NKDPQEILLNEAFVVPYGTPLSVNFGPTVDG

SEQ ID NO: 14927 - protein, 31 aa, Artificial sequence
  synthetic peptide
KDPQEILLNEAFVVPYGTPLSVNFGPTVDGD

SEQ ID NO: 14928 - protein, 31 aa, Artificial sequence
  synthetic peptide
DPQEILLNEAFVVPYGTPLSVNFGPTVDGDF

SEQ ID NO: 14929 - protein, 31 aa, Artificial sequence
  synthetic peptide
PQEILLNEAFVVPYGTPLSVNFGPTVDGDFL

SEQ ID NO: 14930 - protein, 31 aa, Artificial sequence
  synthetic peptide
QEILLNEAFVVPYGTPLSVNFGPTVDGDFLT

SEQ ID NO: 14931 - protein, 31 aa, Artificial sequence
  synthetic peptide
EILLNEAFVVPYGTPLSVNFGPTVDGDFLTD

SEQ ID NO: 14932 - protein, 31 aa, Artificial sequence
  synthetic peptide
ILLNEAFVVPYGTPLSVNFGPTVDGDFLTDM

SEQ ID NO: 14933 - protein, 31 aa, Artificial sequence
  synthetic peptide
LLNEAFVVPYGTPLSVNFGPTVDGDFLTDMP

SEQ ID NO: 14934 - protein, 31 aa, Artificial sequence
  synthetic peptide
LNEAFVVPYGTPLSVNFGPTVDGDFLTDMPD

SEQ ID NO: 14935 - protein, 31 aa, Artificial sequence
  synthetic peptide
NEAFVVPYGTPLSVNFGPTVDGDFLTDMPDI

SEQ ID NO: 14936 - protein, 31 aa, Artificial sequence
  synthetic peptide
EAFVVPYGTPLSVNFGPTVDGDFLTDMPDIL

SEQ ID NO: 14937 - protein, 31 aa, Artificial sequence
  synthetic peptide
AFVVPYGTPLSVNFGPTVDGDFLTDMPDILL

SEQ ID NO: 14938 - protein, 31 aa, Artificial sequence
  synthetic peptide
FVVPYGTPLSVNFGPTVDGDFLTDMPDILLE

SEQ ID NO: 14939 - protein, 31 aa, Artificial sequence
  synthetic peptide
VVPYGTPLSVNFGPTVDGDFLTDMPDILLEL

SEQ ID NO: 14940 - protein, 31 aa, Artificial sequence
  synthetic peptide
VPYGTPLSVNFGPTVDGDFLTDMPDILLELG

SEQ ID NO: 14941 - protein, 31 aa, Artificial sequence
  synthetic peptide
PYGTPLSVNFGPTVDGDFLTDMPDILLELGQ

SEQ ID NO: 14942 - protein, 31 aa, Artificial sequence
  synthetic peptide
YGTPLSVNFGPTVDGDFLTDMPDILLELGQF

SEQ ID NO: 14943 - protein, 31 aa, Artificial sequence
  synthetic peptide
GTPLSVNFGPTVDGDFLTDMPDILLELGQFK

SEQ ID NO: 14944 - protein, 31 aa, Artificial sequence
  synthetic peptide
TPLSVNFGPTVDGDFLTDMPDILLELGQFKK

SEQ ID NO: 14945 - protein, 31 aa, Artificial sequence
  synthetic peptide
PLSVNFGPTVDGDFLTDMPDILLELGQFKKT

SEQ ID NO: 14946 - protein, 31 aa, Artificial sequence
  synthetic peptide
LSVNFGPTVDGDFLTDMPDILLELGQFKKTQ

SEQ ID NO: 14947 - protein, 31 aa, Artificial sequence
  synthetic peptide
SVNFGPTVDGDFLTDMPDILLELGQFKKTQI

SEQ ID NO: 14948 - protein, 31 aa, Artificial sequence
  synthetic peptide
VNFGPTVDGDFLTDMPDILLELGQFKKTQIL

SEQ ID NO: 14949 - protein, 31 aa, Artificial sequence
  synthetic peptide
NFGPTVDGDFLTDMPDILLELGQFKKTQILV

SEQ ID NO: 14950 - protein, 31 aa, Artificial sequence
  synthetic peptide
FGPTVDGDFLTDMPDILLELGQFKKTQILVG

SEQ ID NO: 14951 - protein, 31 aa, Artificial sequence
  synthetic peptide
GPTVDGDFLTDMPDILLELGQFKKTQILVGV

SEQ ID NO: 14952 - protein, 31 aa, Artificial sequence
  synthetic peptide
PTVDGDFLTDMPDILLELGQFKKTQILVGVN

SEQ ID NO: 14953 - protein, 31 aa, Artificial sequence
  synthetic peptide
TVDGDFLTDMPDILLELGQFKKTQILVGVNK

SEQ ID NO: 14954 - protein, 31 aa, Artificial sequence
  synthetic peptide
VDGDFLTDMPDILLELGQFKKTQILVGVNKD

SEQ ID NO: 14955 - protein, 31 aa, Artificial sequence
  synthetic peptide
DGDFLTDMPDILLELGQFKKTQILVGVNKDE

SEQ ID NO: 14956 - protein, 31 aa, Artificial sequence
  synthetic peptide
GDFLTDMPDILLELGQFKKTQILVGVNKDEG

SEQ ID NO: 14957 - protein, 31 aa, Artificial sequence
  synthetic peptide
DFLTDMPDILLELGQFKKTQILVGVNKDEGT

SEQ ID NO: 14958 - protein, 31 aa, Artificial sequence
  synthetic peptide
FLTDMPDILLELGQFKKTQILVGVNKDEGTA

SEQ ID NO: 14959 - protein, 31 aa, Artificial sequence
  synthetic peptide
LTDMPDILLELGQFKKTQILVGVNKDEGTAF

SEQ ID NO: 14960 - protein, 31 aa, Artificial sequence
  synthetic peptide
TDMPDILLELGQFKKTQILVGVNKDEGTAFL

SEQ ID NO: 14961 - protein, 31 aa, Artificial sequence
  synthetic peptide
DMPDILLELGQFKKTQILVGVNKDEGTAFLV

SEQ ID NO: 14962 - protein, 31 aa, Artificial sequence
  synthetic peptide
MPDILLELGQFKKTQILVGVNKDEGTAFLVY

SEQ ID NO: 14963 - protein, 31 aa, Artificial sequence
  synthetic peptide
PDILLELGQFKKTQILVGVNKDEGTAFLVYG

SEQ ID NO: 14964 - protein, 31 aa, Artificial sequence
  synthetic peptide
DILLELGQFKKTQILVGVNKDEGTAFLVYGA

SEQ ID NO: 14965 - protein, 31 aa, Artificial sequence
  synthetic peptide
ILLELGQFKKTQILVGVNKDEGTAFLVYGAP

SEQ ID NO: 14966 - protein, 31 aa, Artificial sequence
  synthetic peptide
LLELGQFKKTQILVGVNKDEGTAFLVYGAPG

SEQ ID NO: 14967 - protein, 31 aa, Artificial sequence
  synthetic peptide
LELGQFKKTQILVGVNKDEGTAFLVYGAPGF

SEQ ID NO: 14968 - protein, 31 aa, Artificial sequence
  synthetic peptide
ELGQFKKTQILVGVNKDEGTAFLVYGAPGFS

SEQ ID NO: 14969 - protein, 31 aa, Artificial sequence
  synthetic peptide
LGQFKKTQILVGVNKDEGTAFLVYGAPGFSK

SEQ ID NO: 14970 - protein, 31 aa, Artificial sequence
  synthetic peptide
GQFKKTQILVGVNKDEGTAFLVYGAPGFSKD

SEQ ID NO: 14971 - protein, 31 aa, Artificial sequence
  synthetic peptide
QFKKTQILVGVNKDEGTAFLVYGAPGFSKDN

SEQ ID NO: 14972 - protein, 31 aa, Artificial sequence
  synthetic peptide
FKKTQILVGVNKDEGTAFLVYGAPGFSKDNN

SEQ ID NO: 14973 - protein, 31 aa, Artificial sequence
  synthetic peptide
KKTQILVGVNKDEGTAFLVYGAPGFSKDNNS

SEQ ID NO: 14974 - protein, 31 aa, Artificial sequence
  synthetic peptide
KTQILVGVNKDEGTAFLVYGAPGFSKDNNSI

SEQ ID NO: 14975 - protein, 31 aa, Artificial sequence
  synthetic peptide
TQILVGVNKDEGTAFLVYGAPGFSKDNNSII

SEQ ID NO: 14976 - protein, 31 aa, Artificial sequence
  synthetic peptide
QILVGVNKDEGTAFLVYGAPGFSKDNNSIIT

SEQ ID NO: 14977 - protein, 31 aa, Artificial sequence
  synthetic peptide
ILVGVNKDEGTAFLVYGAPGFSKDNNSIITR

SEQ ID NO: 14978 - protein, 31 aa, Artificial sequence
  synthetic peptide
LVGVNKDEGTAFLVYGAPGFSKDNNSIITRK

SEQ ID NO: 14979 - protein, 31 aa, Artificial sequence
  synthetic peptide
VGVNKDEGTAFLVYGAPGFSKDNNSIITRKE

SEQ ID NO: 14980 - protein, 31 aa, Artificial sequence
  synthetic peptide
GVNKDEGTAFLVYGAPGFSKDNNSIITRKEF

SEQ ID NO: 14981 - protein, 31 aa, Artificial sequence
  synthetic peptide
VNKDEGTAFLVYGAPGFSKDNNSIITRKEFQ

SEQ ID NO: 14982 - protein, 31 aa, Artificial sequence
  synthetic peptide
NKDEGTAFLVYGAPGFSKDNNSIITRKEFQE

SEQ ID NO: 14983 - protein, 31 aa, Artificial sequence
  synthetic peptide
KDEGTAFLVYGAPGFSKDNNSIITRKEFQEG

SEQ ID NO: 14984 - protein, 31 aa, Artificial sequence
  synthetic peptide
DEGTAFLVYGAPGFSKDNNSIITRKEFQEGL

SEQ ID NO: 14985 - protein, 31 aa, Artificial sequence
  synthetic peptide
EGTAFLVYGAPGFSKDNNSIITRKEFQEGLK

SEQ ID NO: 14986 - protein, 31 aa, Artificial sequence
  synthetic peptide
GTAFLVYGAPGFSKDNNSIITRKEFQEGLKI

SEQ ID NO: 14987 - protein, 31 aa, Artificial sequence
  synthetic peptide
TAFLVYGAPGFSKDNNSIITRKEFQEGLKIF

SEQ ID NO: 14988 - protein, 31 aa, Artificial sequence
  synthetic peptide
AFLVYGAPGFSKDNNSIITRKEFQEGLKIFF

SEQ ID NO: 14989 - protein, 31 aa, Artificial sequence
  synthetic peptide
FLVYGAPGFSKDNNSIITRKEFQEGLKIFFP

SEQ ID NO: 14990 - protein, 31 aa, Artificial sequence
  synthetic peptide
LVYGAPGFSKDNNSIITRKEFQEGLKIFFPG

SEQ ID NO: 14991 - protein, 31 aa, Artificial sequence
  synthetic peptide
VYGAPGFSKDNNSIITRKEFQEGLKIFFPGV

SEQ ID NO: 14992 - protein, 31 aa, Artificial sequence
  synthetic peptide
YGAPGFSKDNNSIITRKEFQEGLKIFFPGVS

SEQ ID NO: 14993 - protein, 31 aa, Artificial sequence
  synthetic peptide
GAPGFSKDNNSIITRKEFQEGLKIFFPGVSE

SEQ ID NO: 14994 - protein, 31 aa, Artificial sequence
  synthetic peptide
APGFSKDNNSIITRKEFQEGLKIFFPGVSEF

SEQ ID NO: 14995 - protein, 31 aa, Artificial sequence
  synthetic peptide
PGFSKDNNSIITRKEFQEGLKIFFPGVSEFG

SEQ ID NO: 14996 - protein, 31 aa, Artificial sequence
  synthetic peptide
GFSKDNNSIITRKEFQEGLKIFFPGVSEFGK

SEQ ID NO: 14997 - protein, 31 aa, Artificial sequence
  synthetic peptide
FSKDNNSIITRKEFQEGLKIFFPGVSEFGKE

SEQ ID NO: 14998 - protein, 31 aa, Artificial sequence
  synthetic peptide
SKDNNSIITRKEFQEGLKIFFPGVSEFGKES

SEQ ID NO: 14999 - protein, 31 aa, Artificial sequence
  synthetic peptide
KDNNSIITRKEFQEGLKIFFPGVSEFGKESI

SEQ ID NO: 15000 - protein, 31 aa, Artificial sequence
  synthetic peptide
DNNSIITRKEFQEGLKIFFPGVSEFGKESIL

SEQ ID NO: 15001 - protein, 31 aa, Artificial sequence
  synthetic peptide
NNSIITRKEFQEGLKIFFPGVSEFGKESILF

SEQ ID NO: 15002 - protein, 31 aa, Artificial sequence
  synthetic peptide
NSIITRKEFQEGLKIFFPGVSEFGKESILFH

SEQ ID NO: 15003 - protein, 31 aa, Artificial sequence
  synthetic peptide
SIITRKEFQEGLKIFFPGVSEFGKESILFHY

SEQ ID NO: 15004 - protein, 31 aa, Artificial sequence
  synthetic peptide
IITRKEFQEGLKIFFPGVSEFGKESILFHYT

SEQ ID NO: 15005 - protein, 31 aa, Artificial sequence
  synthetic peptide
ITRKEFQEGLKIFFPGVSEFGKESILFHYTD

SEQ ID NO: 15006 - protein, 31 aa, Artificial sequence
  synthetic peptide
TRKEFQEGLKIFFPGVSEFGKESILFHYTDW

SEQ ID NO: 15007 - protein, 31 aa, Artificial sequence
  synthetic peptide
RKEFQEGLKIFFPGVSEFGKESILFHYTDWV

SEQ ID NO: 15008 - protein, 31 aa, Artificial sequence
  synthetic peptide
KEFQEGLKIFFPGVSEFGKESILFHYTDWVD

SEQ ID NO: 15009 - protein, 31 aa, Artificial sequence
  synthetic peptide
EFQEGLKIFFPGVSEFGKESILFHYTDWVDD

SEQ ID NO: 15010 - protein, 31 aa, Artificial sequence
  synthetic peptide
FQEGLKIFFPGVSEFGKESILFHYTDWVDDQ

SEQ ID NO: 15011 - protein, 31 aa, Artificial sequence
  synthetic peptide
QEGLKIFFPGVSEFGKESILFHYTDWVDDQR

SEQ ID NO: 15012 - protein, 31 aa, Artificial sequence
  synthetic peptide
EGLKIFFPGVSEFGKESILFHYTDWVDDQRP

SEQ ID NO: 15013 - protein, 31 aa, Artificial sequence
  synthetic peptide
GLKIFFPGVSEFGKESILFHYTDWVDDQRPE

SEQ ID NO: 15014 - protein, 31 aa, Artificial sequence
  synthetic peptide
LKIFFPGVSEFGKESILFHYTDWVDDQRPEN

SEQ ID NO: 15015 - protein, 31 aa, Artificial sequence
  synthetic peptide
KIFFPGVSEFGKESILFHYTDWVDDQRPENY

SEQ ID NO: 15016 - protein, 31 aa, Artificial sequence
  synthetic peptide
IFFPGVSEFGKESILFHYTDWVDDQRPENYR

SEQ ID NO: 15017 - protein, 31 aa, Artificial sequence
  synthetic peptide
FFPGVSEFGKESILFHYTDWVDDQRPENYRE

SEQ ID NO: 15018 - protein, 31 aa, Artificial sequence
  synthetic peptide
FPGVSEFGKESILFHYTDWVDDQRPENYREA

SEQ ID NO: 15019 - protein, 31 aa, Artificial sequence
  synthetic peptide
PGVSEFGKESILFHYTDWVDDQRPENYREAL

SEQ ID NO: 15020 - protein, 31 aa, Artificial sequence
  synthetic peptide
GVSEFGKESILFHYTDWVDDQRPENYREALG

SEQ ID NO: 15021 - protein, 31 aa, Artificial sequence
  synthetic peptide
VSEFGKESILFHYTDWVDDQRPENYREALGD

SEQ ID NO: 15022 - protein, 31 aa, Artificial sequence
  synthetic peptide
SEFGKESILFHYTDWVDDQRPENYREALGDV

SEQ ID NO: 15023 - protein, 31 aa, Artificial sequence
  synthetic peptide
EFGKESILFHYTDWVDDQRPENYREALGDVV

SEQ ID NO: 15024 - protein, 31 aa, Artificial sequence
  synthetic peptide
FGKESILFHYTDWVDDQRPENYREALGDVVG

SEQ ID NO: 15025 - protein, 31 aa, Artificial sequence
  synthetic peptide
GKESILFHYTDWVDDQRPENYREALGDVVGD

SEQ ID NO: 15026 - protein, 31 aa, Artificial sequence
  synthetic peptide
KESILFHYTDWVDDQRPENYREALGDVVGDY

SEQ ID NO: 15027 - protein, 31 aa, Artificial sequence
  synthetic peptide
ESILFHYTDWVDDQRPENYREALGDVVGDYN

SEQ ID NO: 15028 - protein, 31 aa, Artificial sequence
  synthetic peptide
SILFHYTDWVDDQRPENYREALGDVVGDYNF

SEQ ID NO: 15029 - protein, 31 aa, Artificial sequence
  synthetic peptide
ILFHYTDWVDDQRPENYREALGDVVGDYNFI

SEQ ID NO: 15030 - protein, 31 aa, Artificial sequence
  synthetic peptide
LFHYTDWVDDQRPENYREALGDVVGDYNFIC

SEQ ID NO: 15031 - protein, 31 aa, Artificial sequence
  synthetic peptide
FHYTDWVDDQRPENYREALGDVVGDYNFICP

SEQ ID NO: 15032 - protein, 31 aa, Artificial sequence
  synthetic peptide
HYTDWVDDQRPENYREALGDVVGDYNFICPA

SEQ ID NO: 15033 - protein, 31 aa, Artificial sequence
  synthetic peptide
YTDWVDDQRPENYREALGDVVGDYNFICPAL

SEQ ID NO: 15034 - protein, 31 aa, Artificial sequence
  synthetic peptide
TDWVDDQRPENYREALGDVVGDYNFICPALE

SEQ ID NO: 15035 - protein, 31 aa, Artificial sequence
  synthetic peptide
DWVDDQRPENYREALGDVVGDYNFICPALEF

SEQ ID NO: 15036 - protein, 31 aa, Artificial sequence
  synthetic peptide
WVDDQRPENYREALGDVVGDYNFICPALEFT

SEQ ID NO: 15037 - protein, 31 aa, Artificial sequence
  synthetic peptide
VDDQRPENYREALGDVVGDYNFICPALEFTK

SEQ ID NO: 15038 - protein, 31 aa, Artificial sequence
  synthetic peptide
DDQRPENYREALGDVVGDYNFICPALEFTKK

SEQ ID NO: 15039 - protein, 31 aa, Artificial sequence
  synthetic peptide
DQRPENYREALGDVVGDYNFICPALEFTKKF

SEQ ID NO: 15040 - protein, 31 aa, Artificial sequence
  synthetic peptide
QRPENYREALGDVVGDYNFICPALEFTKKFS

SEQ ID NO: 15041 - protein, 31 aa, Artificial sequence
  synthetic peptide
RPENYREALGDVVGDYNFICPALEFTKKFSE

SEQ ID NO: 15042 - protein, 31 aa, Artificial sequence
  synthetic peptide
PENYREALGDVVGDYNFICPALEFTKKFSEW

SEQ ID NO: 15043 - protein, 31 aa, Artificial sequence
  synthetic peptide
ENYREALGDVVGDYNFICPALEFTKKFSEWG

SEQ ID NO: 15044 - protein, 31 aa, Artificial sequence
  synthetic peptide
NYREALGDVVGDYNFICPALEFTKKFSEWGN

SEQ ID NO: 15045 - protein, 31 aa, Artificial sequence
  synthetic peptide
YREALGDVVGDYNFICPALEFTKKFSEWGNN

SEQ ID NO: 15046 - protein, 31 aa, Artificial sequence
  synthetic peptide
REALGDVVGDYNFICPALEFTKKFSEWGNNA

SEQ ID NO: 15047 - protein, 31 aa, Artificial sequence
  synthetic peptide
EALGDVVGDYNFICPALEFTKKFSEWGNNAF

SEQ ID NO: 15048 - protein, 31 aa, Artificial sequence
  synthetic peptide
ALGDVVGDYNFICPALEFTKKFSEWGNNAFF

SEQ ID NO: 15049 - protein, 31 aa, Artificial sequence
  synthetic peptide
LGDVVGDYNFICPALEFTKKFSEWGNNAFFY

SEQ ID NO: 15050 - protein, 31 aa, Artificial sequence
  synthetic peptide
GDVVGDYNFICPALEFTKKFSEWGNNAFFYY

SEQ ID NO: 15051 - protein, 31 aa, Artificial sequence
  synthetic peptide
DVVGDYNFICPALEFTKKFSEWGNNAFFYYF

SEQ ID NO: 15052 - protein, 31 aa, Artificial sequence
  synthetic peptide
VVGDYNFICPALEFTKKFSEWGNNAFFYYFE

SEQ ID NO: 15053 - protein, 31 aa, Artificial sequence
  synthetic peptide
VGDYNFICPALEFTKKFSEWGNNAFFYYFEH

SEQ ID NO: 15054 - protein, 31 aa, Artificial sequence
  synthetic peptide
GDYNFICPALEFTKKFSEWGNNAFFYYFEHR

SEQ ID NO: 15055 - protein, 31 aa, Artificial sequence
  synthetic peptide
DYNFICPALEFTKKFSEWGNNAFFYYFEHRS

SEQ ID NO: 15056 - protein, 31 aa, Artificial sequence
  synthetic peptide
YNFICPALEFTKKFSEWGNNAFFYYFEHRSS

SEQ ID NO: 15057 - protein, 31 aa, Artificial sequence
  synthetic peptide
NFICPALEFTKKFSEWGNNAFFYYFEHRSSK

SEQ ID NO: 15058 - protein, 31 aa, Artificial sequence
  synthetic peptide
FICPALEFTKKFSEWGNNAFFYYFEHRSSKL

SEQ ID NO: 15059 - protein, 31 aa, Artificial sequence
  synthetic peptide
ICPALEFTKKFSEWGNNAFFYYFEHRSSKLP

SEQ ID NO: 15060 - protein, 31 aa, Artificial sequence
  synthetic peptide
CPALEFTKKFSEWGNNAFFYYFEHRSSKLPW

SEQ ID NO: 15061 - protein, 31 aa, Artificial sequence
  synthetic peptide
PALEFTKKFSEWGNNAFFYYFEHRSSKLPWP

SEQ ID NO: 15062 - protein, 31 aa, Artificial sequence
  synthetic peptide
ALEFTKKFSEWGNNAFFYYFEHRSSKLPWPE

SEQ ID NO: 15063 - protein, 31 aa, Artificial sequence
  synthetic peptide
LEFTKKFSEWGNNAFFYYFEHRSSKLPWPEW

SEQ ID NO: 15064 - protein, 31 aa, Artificial sequence
  synthetic peptide
EFTKKFSEWGNNAFFYYFEHRSSKLPWPEWM

SEQ ID NO: 15065 - protein, 31 aa, Artificial sequence
  synthetic peptide
FTKKFSEWGNNAFFYYFEHRSSKLPWPEWMG

SEQ ID NO: 15066 - protein, 31 aa, Artificial sequence
  synthetic peptide
TKKFSEWGNNAFFYYFEHRSSKLPWPEWMGV

SEQ ID NO: 15067 - protein, 31 aa, Artificial sequence
  synthetic peptide
KKFSEWGNNAFFYYFEHRSSKLPWPEWMGVM

SEQ ID NO: 15068 - protein, 31 aa, Artificial sequence
  synthetic peptide
KFSEWGNNAFFYYFEHRSSKLPWPEWMGVMH

SEQ ID NO: 15069 - protein, 31 aa, Artificial sequence
  synthetic peptide
FSEWGNNAFFYYFEHRSSKLPWPEWMGVMHG

SEQ ID NO: 15070 - protein, 31 aa, Artificial sequence
  synthetic peptide
SEWGNNAFFYYFEHRSSKLPWPEWMGVMHGY

SEQ ID NO: 15071 - protein, 31 aa, Artificial sequence
  synthetic peptide
EWGNNAFFYYFEHRSSKLPWPEWMGVMHGYE

SEQ ID NO: 15072 - protein, 31 aa, Artificial sequence
  synthetic peptide
WGNNAFFYYFEHRSSKLPWPEWMGVMHGYEI

SEQ ID NO: 15073 - protein, 31 aa, Artificial sequence
  synthetic peptide
GNNAFFYYFEHRSSKLPWPEWMGVMHGYEIE

SEQ ID NO: 15074 - protein, 31 aa, Artificial sequence
  synthetic peptide
NNAFFYYFEHRSSKLPWPEWMGVMHGYEIEF

SEQ ID NO: 15075 - protein, 31 aa, Artificial sequence
  synthetic peptide
NAFFYYFEHRSSKLPWPEWMGVMHGYEIEFV

SEQ ID NO: 15076 - protein, 31 aa, Artificial sequence
  synthetic peptide
AFFYYFEHRSSKLPWPEWMGVMHGYEIEFVF

SEQ ID NO: 15077 - protein, 31 aa, Artificial sequence
  synthetic peptide
FFYYFEHRSSKLPWPEWMGVMHGYEIEFVFG

SEQ ID NO: 15078 - protein, 31 aa, Artificial sequence
  synthetic peptide
FYYFEHRSSKLPWPEWMGVMHGYEIEFVFGL

SEQ ID NO: 15079 - protein, 31 aa, Artificial sequence
  synthetic peptide
YYFEHRSSKLPWPEWMGVMHGYEIEFVFGLP

SEQ ID NO: 15080 - protein, 31 aa, Artificial sequence
  synthetic peptide
YFEHRSSKLPWPEWMGVMHGYEIEFVFGLPL

SEQ ID NO: 15081 - protein, 31 aa, Artificial sequence
  synthetic peptide
FEHRSSKLPWPEWMGVMHGYEIEFVFGLPLE

SEQ ID NO: 15082 - protein, 31 aa, Artificial sequence
  synthetic peptide
EHRSSKLPWPEWMGVMHGYEIEFVFGLPLER

SEQ ID NO: 15083 - protein, 31 aa, Artificial sequence
  synthetic peptide
HRSSKLPWPEWMGVMHGYEIEFVFGLPLERR

SEQ ID NO: 15084 - protein, 31 aa, Artificial sequence
  synthetic peptide
RSSKLPWPEWMGVMHGYEIEFVFGLPLERRD

SEQ ID NO: 15085 - protein, 31 aa, Artificial sequence
  synthetic peptide
SSKLPWPEWMGVMHGYEIEFVFGLPLERRDN

SEQ ID NO: 15086 - protein, 31 aa, Artificial sequence
  synthetic peptide
SKLPWPEWMGVMHGYEIEFVFGLPLERRDNY

SEQ ID NO: 15087 - protein, 31 aa, Artificial sequence
  synthetic peptide
KLPWPEWMGVMHGYEIEFVFGLPLERRDNYT

SEQ ID NO: 15088 - protein, 31 aa, Artificial sequence
  synthetic peptide
LPWPEWMGVMHGYEIEFVFGLPLERRDNYTK

SEQ ID NO: 15089 - protein, 31 aa, Artificial sequence
  synthetic peptide
PWPEWMGVMHGYEIEFVFGLPLERRDNYTKA

SEQ ID NO: 15090 - protein, 31 aa, Artificial sequence
  synthetic peptide
WPEWMGVMHGYEIEFVFGLPLERRDNYTKAE

SEQ ID NO: 15091 - protein, 31 aa, Artificial sequence
  synthetic peptide
PEWMGVMHGYEIEFVFGLPLERRDNYTKAEE

SEQ ID NO: 15092 - protein, 31 aa, Artificial sequence
  synthetic peptide
EWMGVMHGYEIEFVFGLPLERRDNYTKAEEI

SEQ ID NO: 15093 - protein, 31 aa, Artificial sequence
  synthetic peptide
WMGVMHGYEIEFVFGLPLERRDNYTKAEEIL

SEQ ID NO: 15094 - protein, 31 aa, Artificial sequence
  synthetic peptide
MGVMHGYEIEFVFGLPLERRDNYTKAEEILS

SEQ ID NO: 15095 - protein, 31 aa, Artificial sequence
  synthetic peptide
GVMHGYEIEFVFGLPLERRDNYTKAEEILSR

SEQ ID NO: 15096 - protein, 31 aa, Artificial sequence
  synthetic peptide
VMHGYEIEFVFGLPLERRDNYTKAEEILSRS

SEQ ID NO: 15097 - protein, 31 aa, Artificial sequence
  synthetic peptide
MHGYEIEFVFGLPLERRDNYTKAEEILSRSI

SEQ ID NO: 15098 - protein, 31 aa, Artificial sequence
  synthetic peptide
HGYEIEFVFGLPLERRDNYTKAEEILSRSIV

SEQ ID NO: 15099 - protein, 31 aa, Artificial sequence
  synthetic peptide
GYEIEFVFGLPLERRDNYTKAEEILSRSIVK

SEQ ID NO: 15100 - protein, 31 aa, Artificial sequence
  synthetic peptide
YEIEFVFGLPLERRDNYTKAEEILSRSIVKR

SEQ ID NO: 15101 - protein, 31 aa, Artificial sequence
  synthetic peptide
EIEFVFGLPLERRDNYTKAEEILSRSIVKRW

SEQ ID NO: 15102 - protein, 31 aa, Artificial sequence
  synthetic peptide
IEFVFGLPLERRDNYTKAEEILSRSIVKRWA

SEQ ID NO: 15103 - protein, 31 aa, Artificial sequence
  synthetic peptide
EFVFGLPLERRDNYTKAEEILSRSIVKRWAN

SEQ ID NO: 15104 - protein, 31 aa, Artificial sequence
  synthetic peptide
FVFGLPLERRDNYTKAEEILSRSIVKRWANF

SEQ ID NO: 15105 - protein, 31 aa, Artificial sequence
  synthetic peptide
VFGLPLERRDNYTKAEEILSRSIVKRWANFA

SEQ ID NO: 15106 - protein, 31 aa, Artificial sequence
  synthetic peptide
FGLPLERRDNYTKAEEILSRSIVKRWANFAK

SEQ ID NO: 15107 - protein, 31 aa, Artificial sequence
  synthetic peptide
GLPLERRDNYTKAEEILSRSIVKRWANFAKY

SEQ ID NO: 15108 - protein, 31 aa, Artificial sequence
  synthetic peptide
LPLERRDNYTKAEEILSRSIVKRWANFAKYG

SEQ ID NO: 15109 - protein, 31 aa, Artificial sequence
  synthetic peptide
PLERRDNYTKAEEILSRSIVKRWANFAKYGN

SEQ ID NO: 15110 - protein, 31 aa, Artificial sequence
  synthetic peptide
LERRDNYTKAEEILSRSIVKRWANFAKYGNP

SEQ ID NO: 15111 - protein, 31 aa, Artificial sequence
  synthetic peptide
ERRDNYTKAEEILSRSIVKRWANFAKYGNPN

SEQ ID NO: 15112 - protein, 31 aa, Artificial sequence
  synthetic peptide
RRDNYTKAEEILSRSIVKRWANFAKYGNPNE

SEQ ID NO: 15113 - protein, 31 aa, Artificial sequence
  synthetic peptide
RDNYTKAEEILSRSIVKRWANFAKYGNPNET

SEQ ID NO: 15114 - protein, 31 aa, Artificial sequence
  synthetic peptide
DNYTKAEEILSRSIVKRWANFAKYGNPNETQ

SEQ ID NO: 15115 - protein, 31 aa, Artificial sequence
  synthetic peptide
NYTKAEEILSRSIVKRWANFAKYGNPNETQN

SEQ ID NO: 15116 - protein, 31 aa, Artificial sequence
  synthetic peptide
YTKAEEILSRSIVKRWANFAKYGNPNETQNN

SEQ ID NO: 15117 - protein, 31 aa, Artificial sequence
  synthetic peptide
TKAEEILSRSIVKRWANFAKYGNPNETQNNS

SEQ ID NO: 15118 - protein, 31 aa, Artificial sequence
  synthetic peptide
KAEEILSRSIVKRWANFAKYGNPNETQNNST

SEQ ID NO: 15119 - protein, 31 aa, Artificial sequence
  synthetic peptide
AEEILSRSIVKRWANFAKYGNPNETQNNSTS

SEQ ID NO: 15120 - protein, 31 aa, Artificial sequence
  synthetic peptide
EEILSRSIVKRWANFAKYGNPNETQNNSTSW

SEQ ID NO: 15121 - protein, 31 aa, Artificial sequence
  synthetic peptide
EILSRSIVKRWANFAKYGNPNETQNNSTSWP

SEQ ID NO: 15122 - protein, 31 aa, Artificial sequence
  synthetic peptide
ILSRSIVKRWANFAKYGNPNETQNNSTSWPV

SEQ ID NO: 15123 - protein, 31 aa, Artificial sequence
  synthetic peptide
LSRSIVKRWANFAKYGNPNETQNNSTSWPVF

SEQ ID NO: 15124 - protein, 31 aa, Artificial sequence
  synthetic peptide
SRSIVKRWANFAKYGNPNETQNNSTSWPVFK

SEQ ID NO: 15125 - protein, 31 aa, Artificial sequence
  synthetic peptide
RSIVKRWANFAKYGNPNETQNNSTSWPVFKS

SEQ ID NO: 15126 - protein, 31 aa, Artificial sequence
  synthetic peptide
SIVKRWANFAKYGNPNETQNNSTSWPVFKST

SEQ ID NO: 15127 - protein, 31 aa, Artificial sequence
  synthetic peptide
IVKRWANFAKYGNPNETQNNSTSWPVFKSTE

SEQ ID NO: 15128 - protein, 31 aa, Artificial sequence
  synthetic peptide
VKRWANFAKYGNPNETQNNSTSWPVFKSTEQ

SEQ ID NO: 15129 - protein, 31 aa, Artificial sequence
  synthetic peptide
KRWANFAKYGNPNETQNNSTSWPVFKSTEQK

SEQ ID NO: 15130 - protein, 31 aa, Artificial sequence
  synthetic peptide
RWANFAKYGNPNETQNNSTSWPVFKSTEQKY

SEQ ID NO: 15131 - protein, 31 aa, Artificial sequence
  synthetic peptide
WANFAKYGNPNETQNNSTSWPVFKSTEQKYL

SEQ ID NO: 15132 - protein, 31 aa, Artificial sequence
  synthetic peptide
ANFAKYGNPNETQNNSTSWPVFKSTEQKYLT

SEQ ID NO: 15133 - protein, 31 aa, Artificial sequence
  synthetic peptide
NFAKYGNPNETQNNSTSWPVFKSTEQKYLTL

SEQ ID NO: 15134 - protein, 31 aa, Artificial sequence
  synthetic peptide
FAKYGNPNETQNNSTSWPVFKSTEQKYLTLN

SEQ ID NO: 15135 - protein, 31 aa, Artificial sequence
  synthetic peptide
AKYGNPNETQNNSTSWPVFKSTEQKYLTLNT

SEQ ID NO: 15136 - protein, 31 aa, Artificial sequence
  synthetic peptide
KYGNPNETQNNSTSWPVFKSTEQKYLTLNTE

SEQ ID NO: 15137 - protein, 31 aa, Artificial sequence
  synthetic peptide
YGNPNETQNNSTSWPVFKSTEQKYLTLNTES

SEQ ID NO: 15138 - protein, 31 aa, Artificial sequence
  synthetic peptide
GNPNETQNNSTSWPVFKSTEQKYLTLNTEST

SEQ ID NO: 15139 - protein, 31 aa, Artificial sequence
  synthetic peptide
NPNETQNNSTSWPVFKSTEQKYLTLNTESTR

SEQ ID NO: 15140 - protein, 31 aa, Artificial sequence
  synthetic peptide
PNETQNNSTSWPVFKSTEQKYLTLNTESTRI

SEQ ID NO: 15141 - protein, 31 aa, Artificial sequence
  synthetic peptide
NETQNNSTSWPVFKSTEQKYLTLNTESTRIM

SEQ ID NO: 15142 - protein, 31 aa, Artificial sequence
  synthetic peptide
ETQNNSTSWPVFKSTEQKYLTLNTESTRIMT

SEQ ID NO: 15143 - protein, 31 aa, Artificial sequence
  synthetic peptide
TQNNSTSWPVFKSTEQKYLTLNTESTRIMTK

SEQ ID NO: 15144 - protein, 31 aa, Artificial sequence
  synthetic peptide
QNNSTSWPVFKSTEQKYLTLNTESTRIMTKL

SEQ ID NO: 15145 - protein, 31 aa, Artificial sequence
  synthetic peptide
NNSTSWPVFKSTEQKYLTLNTESTRIMTKLR

SEQ ID NO: 15146 - protein, 31 aa, Artificial sequence
  synthetic peptide
NSTSWPVFKSTEQKYLTLNTESTRIMTKLRA

SEQ ID NO: 15147 - protein, 31 aa, Artificial sequence
  synthetic peptide
STSWPVFKSTEQKYLTLNTESTRIMTKLRAQ

SEQ ID NO: 15148 - protein, 31 aa, Artificial sequence
  synthetic peptide
TSWPVFKSTEQKYLTLNTESTRIMTKLRAQQ

SEQ ID NO: 15149 - protein, 31 aa, Artificial sequence
  synthetic peptide
SWPVFKSTEQKYLTLNTESTRIMTKLRAQQC

SEQ ID NO: 15150 - protein, 31 aa, Artificial sequence
  synthetic peptide
WPVFKSTEQKYLTLNTESTRIMTKLRAQQCR

SEQ ID NO: 15151 - protein, 31 aa, Artificial sequence
  synthetic peptide
PVFKSTEQKYLTLNTESTRIMTKLRAQQCRF

SEQ ID NO: 15152 - protein, 31 aa, Artificial sequence
  synthetic peptide
VFKSTEQKYLTLNTESTRIMTKLRAQQCRFW

SEQ ID NO: 15153 - protein, 31 aa, Artificial sequence
  synthetic peptide
FKSTEQKYLTLNTESTRIMTKLRAQQCRFWT

SEQ ID NO: 15154 - protein, 31 aa, Artificial sequence
  synthetic peptide
KSTEQKYLTLNTESTRIMTKLRAQQCRFWTS

SEQ ID NO: 15155 - protein, 31 aa, Artificial sequence
  synthetic peptide
STEQKYLTLNTESTRIMTKLRAQQCRFWTSF

SEQ ID NO: 15156 - protein, 31 aa, Artificial sequence
  synthetic peptide
TEQKYLTLNTESTRIMTKLRAQQCRFWTSFF

SEQ ID NO: 15157 - protein, 31 aa, Artificial sequence
  synthetic peptide
EQKYLTLNTESTRIMTKLRAQQCRFWTSFFP

SEQ ID NO: 15158 - protein, 31 aa, Artificial sequence
  synthetic peptide
QKYLTLNTESTRIMTKLRAQQCRFWTSFFPK

SEQ ID NO: 15159 - protein, 31 aa, Artificial sequence
  synthetic peptide
KYLTLNTESTRIMTKLRAQQCRFWTSFFPKV

SEQ ID NO: 15160 - protein, 31 aa, Artificial sequence
  synthetic peptide
YLTLNTESTRIMTKLRAQQCRFWTSFFPKVL

SEQ ID NO: 15161 - protein, 31 aa, Artificial sequence
  synthetic peptide
LTLNTESTRIMTKLRAQQCRFWTSFFPKVLE

SEQ ID NO: 15162 - protein, 31 aa, Artificial sequence
  synthetic peptide
TLNTESTRIMTKLRAQQCRFWTSFFPKVLEM

SEQ ID NO: 15163 - protein, 31 aa, Artificial sequence
  synthetic peptide
LNTESTRIMTKLRAQQCRFWTSFFPKVLEMT

SEQ ID NO: 15164 - protein, 31 aa, Artificial sequence
  synthetic peptide
NTESTRIMTKLRAQQCRFWTSFFPKVLEMTG

SEQ ID NO: 15165 - protein, 31 aa, Artificial sequence
  synthetic peptide
TESTRIMTKLRAQQCRFWTSFFPKVLEMTGN

SEQ ID NO: 15166 - protein, 31 aa, Artificial sequence
  synthetic peptide
ESTRIMTKLRAQQCRFWTSFFPKVLEMTGNI

SEQ ID NO: 15167 - protein, 31 aa, Artificial sequence
  synthetic peptide
STRIMTKLRAQQCRFWTSFFPKVLEMTGNID

SEQ ID NO: 15168 - protein, 31 aa, Artificial sequence
  synthetic peptide
TRIMTKLRAQQCRFWTSFFPKVLEMTGNIDE

SEQ ID NO: 15169 - protein, 31 aa, Artificial sequence
  synthetic peptide
RIMTKLRAQQCRFWTSFFPKVLEMTGNIDEA

SEQ ID NO: 15170 - protein, 31 aa, Artificial sequence
  synthetic peptide
IMTKLRAQQCRFWTSFFPKVLEMTGNIDEAE

SEQ ID NO: 15171 - protein, 31 aa, Artificial sequence
  synthetic peptide
MTKLRAQQCRFWTSFFPKVLEMTGNIDEAEW

SEQ ID NO: 15172 - protein, 31 aa, Artificial sequence
  synthetic peptide
TKLRAQQCRFWTSFFPKVLEMTGNIDEAEWE

SEQ ID NO: 15173 - protein, 31 aa, Artificial sequence
  synthetic peptide
KLRAQQCRFWTSFFPKVLEMTGNIDEAEWEW

SEQ ID NO: 15174 - protein, 31 aa, Artificial sequence
  synthetic peptide
LRAQQCRFWTSFFPKVLEMTGNIDEAEWEWK

SEQ ID NO: 15175 - protein, 31 aa, Artificial sequence
  synthetic peptide
RAQQCRFWTSFFPKVLEMTGNIDEAEWEWKA

SEQ ID NO: 15176 - protein, 31 aa, Artificial sequence
  synthetic peptide
AQQCRFWTSFFPKVLEMTGNIDEAEWEWKAG

SEQ ID NO: 15177 - protein, 31 aa, Artificial sequence
  synthetic peptide
QQCRFWTSFFPKVLEMTGNIDEAEWEWKAGF

SEQ ID NO: 15178 - protein, 31 aa, Artificial sequence
  synthetic peptide
QCRFWTSFFPKVLEMTGNIDEAEWEWKAGFH

SEQ ID NO: 15179 - protein, 31 aa, Artificial sequence
  synthetic peptide
CRFWTSFFPKVLEMTGNIDEAEWEWKAGFHR

SEQ ID NO: 15180 - protein, 31 aa, Artificial sequence
  synthetic peptide
RFWTSFFPKVLEMTGNIDEAEWEWKAGFHRW

SEQ ID NO: 15181 - protein, 31 aa, Artificial sequence
  synthetic peptide
FWTSFFPKVLEMTGNIDEAEWEWKAGFHRWN

SEQ ID NO: 15182 - protein, 31 aa, Artificial sequence
  synthetic peptide
WTSFFPKVLEMTGNIDEAEWEWKAGFHRWNN

SEQ ID NO: 15183 - protein, 31 aa, Artificial sequence
  synthetic peptide
TSFFPKVLEMTGNIDEAEWEWKAGFHRWNNY

SEQ ID NO: 15184 - protein, 31 aa, Artificial sequence
  synthetic peptide
SFFPKVLEMTGNIDEAEWEWKAGFHRWNNYM

SEQ ID NO: 15185 - protein, 31 aa, Artificial sequence
  synthetic peptide
FFPKVLEMTGNIDEAEWEWKAGFHRWNNYMM

SEQ ID NO: 15186 - protein, 31 aa, Artificial sequence
  synthetic peptide
FPKVLEMTGNIDEAEWEWKAGFHRWNNYMMD

SEQ ID NO: 15187 - protein, 31 aa, Artificial sequence
  synthetic peptide
PKVLEMTGNIDEAEWEWKAGFHRWNNYMMDW

SEQ ID NO: 15188 - protein, 31 aa, Artificial sequence
  synthetic peptide
KVLEMTGNIDEAEWEWKAGFHRWNNYMMDWK

SEQ ID NO: 15189 - protein, 31 aa, Artificial sequence
  synthetic peptide
VLEMTGNIDEAEWEWKAGFHRWNNYMMDWKN

SEQ ID NO: 15190 - protein, 31 aa, Artificial sequence
  synthetic peptide
LEMTGNIDEAEWEWKAGFHRWNNYMMDWKNQ

SEQ ID NO: 15191 - protein, 31 aa, Artificial sequence
  synthetic peptide
EMTGNIDEAEWEWKAGFHRWNNYMMDWKNQF

SEQ ID NO: 15192 - protein, 31 aa, Artificial sequence
  synthetic peptide
MTGNIDEAEWEWKAGFHRWNNYMMDWKNQFN

SEQ ID NO: 15193 - protein, 31 aa, Artificial sequence
  synthetic peptide
TGNIDEAEWEWKAGFHRWNNYMMDWKNQFND

SEQ ID NO: 15194 - protein, 31 aa, Artificial sequence
  synthetic peptide
GNIDEAEWEWKAGFHRWNNYMMDWKNQFNDY

SEQ ID NO: 15195 - protein, 31 aa, Artificial sequence
  synthetic peptide
NIDEAEWEWKAGFHRWNNYMMDWKNQFNDYT

SEQ ID NO: 15196 - protein, 31 aa, Artificial sequence
  synthetic peptide
IDEAEWEWKAGFHRWNNYMMDWKNQFNDYTS

SEQ ID NO: 15197 - protein, 31 aa, Artificial sequence
  synthetic peptide
DEAEWEWKAGFHRWNNYMMDWKNQFNDYTSK

SEQ ID NO: 15198 - protein, 31 aa, Artificial sequence
  synthetic peptide
EAEWEWKAGFHRWNNYMMDWKNQFNDYTSKK

SEQ ID NO: 15199 - protein, 31 aa, Artificial sequence
  synthetic peptide
AEWEWKAGFHRWNNYMMDWKNQFNDYTSKKE

SEQ ID NO: 15200 - protein, 31 aa, Artificial sequence
  synthetic peptide
EWEWKAGFHRWNNYMMDWKNQFNDYTSKKES

SEQ ID NO: 15201 - protein, 31 aa, Artificial sequence
  synthetic peptide
WEWKAGFHRWNNYMMDWKNQFNDYTSKKESC

SEQ ID NO: 15202 - protein, 31 aa, Artificial sequence
  synthetic peptide
EWKAGFHRWNNYMMDWKNQFNDYTSKKESCV

SEQ ID NO: 15203 - protein, 31 aa, Artificial sequence
  synthetic peptide
WKAGFHRWNNYMMDWKNQFNDYTSKKESCVG

SEQ ID NO: 15204 - protein, 31 aa, Artificial sequence
  synthetic peptide
KAGFHRWNNYMMDWKNQFNDYTSKKESCVGL

SEQ ID NO: 15205 - protein, 32 aa, Artificial sequence
  synthetic peptide
MHSKVTIICIRFLFWFLLLCMLIGKSHTEDDI

SEQ ID NO: 15206 - protein, 32 aa, Artificial sequence
  synthetic peptide
HSKVTIICIRFLFWFLLLCMLIGKSHTEDDII

SEQ ID NO: 15207 - protein, 32 aa, Artificial sequence
  synthetic peptide
SKVTIICIRFLFWFLLLCMLIGKSHTEDDIII

SEQ ID NO: 15208 - protein, 32 aa, Artificial sequence
  synthetic peptide
KVTIICIRFLFWFLLLCMLIGKSHTEDDIIIA

SEQ ID NO: 15209 - protein, 32 aa, Artificial sequence
  synthetic peptide
VTIICIRFLFWFLLLCMLIGKSHTEDDIIIAT

SEQ ID NO: 15210 - protein, 32 aa, Artificial sequence
  synthetic peptide
TIICIRFLFWFLLLCMLIGKSHTEDDIIIATK

SEQ ID NO: 15211 - protein, 32 aa, Artificial sequence
  synthetic peptide
IICIRFLFWFLLLCMLIGKSHTEDDIIIATKN

SEQ ID NO: 15212 - protein, 32 aa, Artificial sequence
  synthetic peptide
ICIRFLFWFLLLCMLIGKSHTEDDIIIATKNG

SEQ ID NO: 15213 - protein, 32 aa, Artificial sequence
  synthetic peptide
CIRFLFWFLLLCMLIGKSHTEDDIIIATKNGK

SEQ ID NO: 15214 - protein, 32 aa, Artificial sequence
  synthetic peptide
IRFLFWFLLLCMLIGKSHTEDDIIIATKNGKV

SEQ ID NO: 15215 - protein, 32 aa, Artificial sequence
  synthetic peptide
RFLFWFLLLCMLIGKSHTEDDIIIATKNGKVR

SEQ ID NO: 15216 - protein, 32 aa, Artificial sequence
  synthetic peptide
FLFWFLLLCMLIGKSHTEDDIIIATKNGKVRG

SEQ ID NO: 15217 - protein, 32 aa, Artificial sequence
  synthetic peptide
LFWFLLLCMLIGKSHTEDDIIIATKNGKVRGM

SEQ ID NO: 15218 - protein, 32 aa, Artificial sequence
  synthetic peptide
FWFLLLCMLIGKSHTEDDIIIATKNGKVRGMN

SEQ ID NO: 15219 - protein, 32 aa, Artificial sequence
  synthetic peptide
WFLLLCMLIGKSHTEDDIIIATKNGKVRGMNL

SEQ ID NO: 15220 - protein, 32 aa, Artificial sequence
  synthetic peptide
FLLLCMLIGKSHTEDDIIIATKNGKVRGMNLT

SEQ ID NO: 15221 - protein, 32 aa, Artificial sequence
  synthetic peptide
LLLCMLIGKSHTEDDIIIATKNGKVRGMNLTV

SEQ ID NO: 15222 - protein, 32 aa, Artificial sequence
  synthetic peptide
LLCMLIGKSHTEDDIIIATKNGKVRGMNLTVF

SEQ ID NO: 15223 - protein, 32 aa, Artificial sequence
  synthetic peptide
LCMLIGKSHTEDDIIIATKNGKVRGMNLTVFG

SEQ ID NO: 15224 - protein, 32 aa, Artificial sequence
  synthetic peptide
CMLIGKSHTEDDIIIATKNGKVRGMNLTVFGG

SEQ ID NO: 15225 - protein, 32 aa, Artificial sequence
  synthetic peptide
MLIGKSHTEDDIIIATKNGKVRGMNLTVFGGT

SEQ ID NO: 15226 - protein, 32 aa, Artificial sequence
  synthetic peptide
LIGKSHTEDDIIIATKNGKVRGMNLTVFGGTV

SEQ ID NO: 15227 - protein, 32 aa, Artificial sequence
  synthetic peptide
IGKSHTEDDIIIATKNGKVRGMNLTVFGGTVT

SEQ ID NO: 15228 - protein, 32 aa, Artificial sequence
  synthetic peptide
GKSHTEDDIIIATKNGKVRGMNLTVFGGTVTA

SEQ ID NO: 15229 - protein, 32 aa, Artificial sequence
  synthetic peptide
KSHTEDDIIIATKNGKVRGMNLTVFGGTVTAF

SEQ ID NO: 15230 - protein, 32 aa, Artificial sequence
  synthetic peptide
SHTEDDIIIATKNGKVRGMNLTVFGGTVTAFL

SEQ ID NO: 15231 - protein, 32 aa, Artificial sequence
  synthetic peptide
HTEDDIIIATKNGKVRGMNLTVFGGTVTAFLG

SEQ ID NO: 15232 - protein, 32 aa, Artificial sequence
  synthetic peptide
TEDDIIIATKNGKVRGMNLTVFGGTVTAFLGI

SEQ ID NO: 15233 - protein, 32 aa, Artificial sequence
  synthetic peptide
EDDIIIATKNGKVRGMNLTVFGGTVTAFLGIP

SEQ ID NO: 15234 - protein, 32 aa, Artificial sequence
  synthetic peptide
DDIIIATKNGKVRGMNLTVFGGTVTAFLGIPY

SEQ ID NO: 15235 - protein, 32 aa, Artificial sequence
  synthetic peptide
DIIIATKNGKVRGMNLTVFGGTVTAFLGIPYA

SEQ ID NO: 15236 - protein, 32 aa, Artificial sequence
  synthetic peptide
IIIATKNGKVRGMNLTVFGGTVTAFLGIPYAQ

SEQ ID NO: 15237 - protein, 32 aa, Artificial sequence
  synthetic peptide
IIATKNGKVRGMNLTVFGGTVTAFLGIPYAQP

SEQ ID NO: 15238 - protein, 32 aa, Artificial sequence
  synthetic peptide
IATKNGKVRGMNLTVFGGTVTAFLGIPYAQPP

SEQ ID NO: 15239 - protein, 32 aa, Artificial sequence
  synthetic peptide
ATKNGKVRGMNLTVFGGTVTAFLGIPYAQPPL

SEQ ID NO: 15240 - protein, 32 aa, Artificial sequence
  synthetic peptide
TKNGKVRGMNLTVFGGTVTAFLGIPYAQPPLG

SEQ ID NO: 15241 - protein, 32 aa, Artificial sequence
  synthetic peptide
KNGKVRGMNLTVFGGTVTAFLGIPYAQPPLGR

SEQ ID NO: 15242 - protein, 32 aa, Artificial sequence
  synthetic peptide
NGKVRGMNLTVFGGTVTAFLGIPYAQPPLGRL

SEQ ID NO: 15243 - protein, 32 aa, Artificial sequence
  synthetic peptide
GKVRGMNLTVFGGTVTAFLGIPYAQPPLGRLR

SEQ ID NO: 15244 - protein, 32 aa, Artificial sequence
  synthetic peptide
KVRGMNLTVFGGTVTAFLGIPYAQPPLGRLRF

SEQ ID NO: 15245 - protein, 32 aa, Artificial sequence
  synthetic peptide
VRGMNLTVFGGTVTAFLGIPYAQPPLGRLRFK

SEQ ID NO: 15246 - protein, 32 aa, Artificial sequence
  synthetic peptide
RGMNLTVFGGTVTAFLGIPYAQPPLGRLRFKK

SEQ ID NO: 15247 - protein, 32 aa, Artificial sequence
  synthetic peptide
GMNLTVFGGTVTAFLGIPYAQPPLGRLRFKKP

SEQ ID NO: 15248 - protein, 32 aa, Artificial sequence
  synthetic peptide
MNLTVFGGTVTAFLGIPYAQPPLGRLRFKKPQ

SEQ ID NO: 15249 - protein, 32 aa, Artificial sequence
  synthetic peptide
NLTVFGGTVTAFLGIPYAQPPLGRLRFKKPQS

SEQ ID NO: 15250 - protein, 32 aa, Artificial sequence
  synthetic peptide
LTVFGGTVTAFLGIPYAQPPLGRLRFKKPQSL

SEQ ID NO: 15251 - protein, 32 aa, Artificial sequence
  synthetic peptide
TVFGGTVTAFLGIPYAQPPLGRLRFKKPQSLT

SEQ ID NO: 15252 - protein, 32 aa, Artificial sequence
  synthetic peptide
VFGGTVTAFLGIPYAQPPLGRLRFKKPQSLTK

SEQ ID NO: 15253 - protein, 32 aa, Artificial sequence
  synthetic peptide
FGGTVTAFLGIPYAQPPLGRLRFKKPQSLTKW

SEQ ID NO: 15254 - protein, 32 aa, Artificial sequence
  synthetic peptide
GGTVTAFLGIPYAQPPLGRLRFKKPQSLTKWS

SEQ ID NO: 15255 - protein, 32 aa, Artificial sequence
  synthetic peptide
GTVTAFLGIPYAQPPLGRLRFKKPQSLTKWSD

SEQ ID NO: 15256 - protein, 32 aa, Artificial sequence
  synthetic peptide
TVTAFLGIPYAQPPLGRLRFKKPQSLTKWSDI

SEQ ID NO: 15257 - protein, 32 aa, Artificial sequence
  synthetic peptide
VTAFLGIPYAQPPLGRLRFKKPQSLTKWSDIW

SEQ ID NO: 15258 - protein, 32 aa, Artificial sequence
  synthetic peptide
TAFLGIPYAQPPLGRLRFKKPQSLTKWSDIWN

SEQ ID NO: 15259 - protein, 32 aa, Artificial sequence
  synthetic peptide
AFLGIPYAQPPLGRLRFKKPQSLTKWSDIWNA

SEQ ID NO: 15260 - protein, 32 aa, Artificial sequence
  synthetic peptide
FLGIPYAQPPLGRLRFKKPQSLTKWSDIWNAT

SEQ ID NO: 15261 - protein, 32 aa, Artificial sequence
  synthetic peptide
LGIPYAQPPLGRLRFKKPQSLTKWSDIWNATK

SEQ ID NO: 15262 - protein, 32 aa, Artificial sequence
  synthetic peptide
GIPYAQPPLGRLRFKKPQSLTKWSDIWNATKY

SEQ ID NO: 15263 - protein, 32 aa, Artificial sequence
  synthetic peptide
IPYAQPPLGRLRFKKPQSLTKWSDIWNATKYA

SEQ ID NO: 15264 - protein, 32 aa, Artificial sequence
  synthetic peptide
PYAQPPLGRLRFKKPQSLTKWSDIWNATKYAN

SEQ ID NO: 15265 - protein, 32 aa, Artificial sequence
  synthetic peptide
YAQPPLGRLRFKKPQSLTKWSDIWNATKYANS

SEQ ID NO: 15266 - protein, 32 aa, Artificial sequence
  synthetic peptide
AQPPLGRLRFKKPQSLTKWSDIWNATKYANSC

SEQ ID NO: 15267 - protein, 32 aa, Artificial sequence
  synthetic peptide
QPPLGRLRFKKPQSLTKWSDIWNATKYANSCC

SEQ ID NO: 15268 - protein, 32 aa, Artificial sequence
  synthetic peptide
PPLGRLRFKKPQSLTKWSDIWNATKYANSCCQ

SEQ ID NO: 15269 - protein, 32 aa, Artificial sequence
  synthetic peptide
PLGRLRFKKPQSLTKWSDIWNATKYANSCCQN

SEQ ID NO: 15270 - protein, 32 aa, Artificial sequence
  synthetic peptide
LGRLRFKKPQSLTKWSDIWNATKYANSCCQNI

SEQ ID NO: 15271 - protein, 32 aa, Artificial sequence
  synthetic peptide
GRLRFKKPQSLTKWSDIWNATKYANSCCQNID

SEQ ID NO: 15272 - protein, 32 aa, Artificial sequence
  synthetic peptide
RLRFKKPQSLTKWSDIWNATKYANSCCQNIDQ

SEQ ID NO: 15273 - protein, 32 aa, Artificial sequence
  synthetic peptide
LRFKKPQSLTKWSDIWNATKYANSCCQNIDQS

SEQ ID NO: 15274 - protein, 32 aa, Artificial sequence
  synthetic peptide
RFKKPQSLTKWSDIWNATKYANSCCQNIDQSF

SEQ ID NO: 15275 - protein, 32 aa, Artificial sequence
  synthetic peptide
FKKPQSLTKWSDIWNATKYANSCCQNIDQSFP

SEQ ID NO: 15276 - protein, 32 aa, Artificial sequence
  synthetic peptide
KKPQSLTKWSDIWNATKYANSCCQNIDQSFPG

SEQ ID NO: 15277 - protein, 32 aa, Artificial sequence
  synthetic peptide
KPQSLTKWSDIWNATKYANSCCQNIDQSFPGF

SEQ ID NO: 15278 - protein, 32 aa, Artificial sequence
  synthetic peptide
PQSLTKWSDIWNATKYANSCCQNIDQSFPGFH

SEQ ID NO: 15279 - protein, 32 aa, Artificial sequence
  synthetic peptide
QSLTKWSDIWNATKYANSCCQNIDQSFPGFHG

SEQ ID NO: 15280 - protein, 32 aa, Artificial sequence
  synthetic peptide
SLTKWSDIWNATKYANSCCQNIDQSFPGFHGS

SEQ ID NO: 15281 - protein, 32 aa, Artificial sequence
  synthetic peptide
LTKWSDIWNATKYANSCCQNIDQSFPGFHGSE

SEQ ID NO: 15282 - protein, 32 aa, Artificial sequence
  synthetic peptide
TKWSDIWNATKYANSCCQNIDQSFPGFHGSEM

SEQ ID NO: 15283 - protein, 32 aa, Artificial sequence
  synthetic peptide
KWSDIWNATKYANSCCQNIDQSFPGFHGSEMW

SEQ ID NO: 15284 - protein, 32 aa, Artificial sequence
  synthetic peptide
WSDIWNATKYANSCCQNIDQSFPGFHGSEMWN

SEQ ID NO: 15285 - protein, 32 aa, Artificial sequence
  synthetic peptide
SDIWNATKYANSCCQNIDQSFPGFHGSEMWNP

SEQ ID NO: 15286 - protein, 32 aa, Artificial sequence
  synthetic peptide
DIWNATKYANSCCQNIDQSFPGFHGSEMWNPN

SEQ ID NO: 15287 - protein, 32 aa, Artificial sequence
  synthetic peptide
IWNATKYANSCCQNIDQSFPGFHGSEMWNPNT

SEQ ID NO: 15288 - protein, 32 aa, Artificial sequence
  synthetic peptide
WNATKYANSCCQNIDQSFPGFHGSEMWNPNTD

SEQ ID NO: 15289 - protein, 32 aa, Artificial sequence
  synthetic peptide
NATKYANSCCQNIDQSFPGFHGSEMWNPNTDL

SEQ ID NO: 15290 - protein, 32 aa, Artificial sequence
  synthetic peptide
ATKYANSCCQNIDQSFPGFHGSEMWNPNTDLS

SEQ ID NO: 15291 - protein, 32 aa, Artificial sequence
  synthetic peptide
TKYANSCCQNIDQSFPGFHGSEMWNPNTDLSE

SEQ ID NO: 15292 - protein, 32 aa, Artificial sequence
  synthetic peptide
KYANSCCQNIDQSFPGFHGSEMWNPNTDLSED

SEQ ID NO: 15293 - protein, 32 aa, Artificial sequence
  synthetic peptide
YANSCCQNIDQSFPGFHGSEMWNPNTDLSEDC

SEQ ID NO: 15294 - protein, 32 aa, Artificial sequence
  synthetic peptide
ANSCCQNIDQSFPGFHGSEMWNPNTDLSEDCL

SEQ ID NO: 15295 - protein, 32 aa, Artificial sequence
  synthetic peptide
NSCCQNIDQSFPGFHGSEMWNPNTDLSEDCLY

SEQ ID NO: 15296 - protein, 32 aa, Artificial sequence
  synthetic peptide
SCCQNIDQSFPGFHGSEMWNPNTDLSEDCLYL

SEQ ID NO: 15297 - protein, 32 aa, Artificial sequence
  synthetic peptide
CCQNIDQSFPGFHGSEMWNPNTDLSEDCLYLN

SEQ ID NO: 15298 - protein, 32 aa, Artificial sequence
  synthetic peptide
CQNIDQSFPGFHGSEMWNPNTDLSEDCLYLNV

SEQ ID NO: 15299 - protein, 32 aa, Artificial sequence
  synthetic peptide
QNIDQSFPGFHGSEMWNPNTDLSEDCLYLNVW

SEQ ID NO: 15300 - protein, 32 aa, Artificial sequence
  synthetic peptide
NIDQSFPGFHGSEMWNPNTDLSEDCLYLNVWI

SEQ ID NO: 15301 - protein, 32 aa, Artificial sequence
  synthetic peptide
IDQSFPGFHGSEMWNPNTDLSEDCLYLNVWIP

SEQ ID NO: 15302 - protein, 32 aa, Artificial sequence
  synthetic peptide
DQSFPGFHGSEMWNPNTDLSEDCLYLNVWIPA

SEQ ID NO: 15303 - protein, 32 aa, Artificial sequence
  synthetic peptide
QSFPGFHGSEMWNPNTDLSEDCLYLNVWIPAP

SEQ ID NO: 15304 - protein, 32 aa, Artificial sequence
  synthetic peptide
SFPGFHGSEMWNPNTDLSEDCLYLNVWIPAPK

SEQ ID NO: 15305 - protein, 32 aa, Artificial sequence
  synthetic peptide
FPGFHGSEMWNPNTDLSEDCLYLNVWIPAPKP

SEQ ID NO: 15306 - protein, 32 aa, Artificial sequence
  synthetic peptide
PGFHGSEMWNPNTDLSEDCLYLNVWIPAPKPK

SEQ ID NO: 15307 - protein, 32 aa, Artificial sequence
  synthetic peptide
GFHGSEMWNPNTDLSEDCLYLNVWIPAPKPKN

SEQ ID NO: 15308 - protein, 32 aa, Artificial sequence
  synthetic peptide
FHGSEMWNPNTDLSEDCLYLNVWIPAPKPKNA

SEQ ID NO: 15309 - protein, 32 aa, Artificial sequence
  synthetic peptide
HGSEMWNPNTDLSEDCLYLNVWIPAPKPKNAT

SEQ ID NO: 15310 - protein, 32 aa, Artificial sequence
  synthetic peptide
GSEMWNPNTDLSEDCLYLNVWIPAPKPKNATV

SEQ ID NO: 15311 - protein, 32 aa, Artificial sequence
  synthetic peptide
SEMWNPNTDLSEDCLYLNVWIPAPKPKNATVL

SEQ ID NO: 15312 - protein, 32 aa, Artificial sequence
  synthetic peptide
EMWNPNTDLSEDCLYLNVWIPAPKPKNATVLI

SEQ ID NO: 15313 - protein, 32 aa, Artificial sequence
  synthetic peptide
MWNPNTDLSEDCLYLNVWIPAPKPKNATVLIW

SEQ ID NO: 15314 - protein, 32 aa, Artificial sequence
  synthetic peptide
WNPNTDLSEDCLYLNVWIPAPKPKNATVLIWI

SEQ ID NO: 15315 - protein, 32 aa, Artificial sequence
  synthetic peptide
NPNTDLSEDCLYLNVWIPAPKPKNATVLIWIY

SEQ ID NO: 15316 - protein, 32 aa, Artificial sequence
  synthetic peptide
PNTDLSEDCLYLNVWIPAPKPKNATVLIWIYG

SEQ ID NO: 15317 - protein, 32 aa, Artificial sequence
  synthetic peptide
NTDLSEDCLYLNVWIPAPKPKNATVLIWIYGG

SEQ ID NO: 15318 - protein, 32 aa, Artificial sequence
  synthetic peptide
TDLSEDCLYLNVWIPAPKPKNATVLIWIYGGG

SEQ ID NO: 15319 - protein, 32 aa, Artificial sequence
  synthetic peptide
DLSEDCLYLNVWIPAPKPKNATVLIWIYGGGF

SEQ ID NO: 15320 - protein, 32 aa, Artificial sequence
  synthetic peptide
LSEDCLYLNVWIPAPKPKNATVLIWIYGGGFQ

SEQ ID NO: 15321 - protein, 32 aa, Artificial sequence
  synthetic peptide
SEDCLYLNVWIPAPKPKNATVLIWIYGGGFQT

SEQ ID NO: 15322 - protein, 32 aa, Artificial sequence
  synthetic peptide
EDCLYLNVWIPAPKPKNATVLIWIYGGGFQTG

SEQ ID NO: 15323 - protein, 32 aa, Artificial sequence
  synthetic peptide
DCLYLNVWIPAPKPKNATVLIWIYGGGFQTGT

SEQ ID NO: 15324 - protein, 32 aa, Artificial sequence
  synthetic peptide
CLYLNVWIPAPKPKNATVLIWIYGGGFQTGTS

SEQ ID NO: 15325 - protein, 32 aa, Artificial sequence
  synthetic peptide
LYLNVWIPAPKPKNATVLIWIYGGGFQTGTSS

SEQ ID NO: 15326 - protein, 32 aa, Artificial sequence
  synthetic peptide
YLNVWIPAPKPKNATVLIWIYGGGFQTGTSSL

SEQ ID NO: 15327 - protein, 32 aa, Artificial sequence
  synthetic peptide
LNVWIPAPKPKNATVLIWIYGGGFQTGTSSLH

SEQ ID NO: 15328 - protein, 32 aa, Artificial sequence
  synthetic peptide
NVWIPAPKPKNATVLIWIYGGGFQTGTSSLHV

SEQ ID NO: 15329 - protein, 32 aa, Artificial sequence
  synthetic peptide
VWIPAPKPKNATVLIWIYGGGFQTGTSSLHVY

SEQ ID NO: 15330 - protein, 32 aa, Artificial sequence
  synthetic peptide
WIPAPKPKNATVLIWIYGGGFQTGTSSLHVYD

SEQ ID NO: 15331 - protein, 32 aa, Artificial sequence
  synthetic peptide
IPAPKPKNATVLIWIYGGGFQTGTSSLHVYDG

SEQ ID NO: 15332 - protein, 32 aa, Artificial sequence
  synthetic peptide
PAPKPKNATVLIWIYGGGFQTGTSSLHVYDGK

SEQ ID NO: 15333 - protein, 32 aa, Artificial sequence
  synthetic peptide
APKPKNATVLIWIYGGGFQTGTSSLHVYDGKF

SEQ ID NO: 15334 - protein, 32 aa, Artificial sequence
  synthetic peptide
PKPKNATVLIWIYGGGFQTGTSSLHVYDGKFL

SEQ ID NO: 15335 - protein, 32 aa, Artificial sequence
  synthetic peptide
KPKNATVLIWIYGGGFQTGTSSLHVYDGKFLA

SEQ ID NO: 15336 - protein, 32 aa, Artificial sequence
  synthetic peptide
PKNATVLIWIYGGGFQTGTSSLHVYDGKFLAR

SEQ ID NO: 15337 - protein, 32 aa, Artificial sequence
  synthetic peptide
KNATVLIWIYGGGFQTGTSSLHVYDGKFLARV

SEQ ID NO: 15338 - protein, 32 aa, Artificial sequence
  synthetic peptide
NATVLIWIYGGGFQTGTSSLHVYDGKFLARVE

SEQ ID NO: 15339 - protein, 32 aa, Artificial sequence
  synthetic peptide
ATVLIWIYGGGFQTGTSSLHVYDGKFLARVER

SEQ ID NO: 15340 - protein, 32 aa, Artificial sequence
  synthetic peptide
TVLIWIYGGGFQTGTSSLHVYDGKFLARVERV

SEQ ID NO: 15341 - protein, 32 aa, Artificial sequence
  synthetic peptide
VLIWIYGGGFQTGTSSLHVYDGKFLARVERVI

SEQ ID NO: 15342 - protein, 32 aa, Artificial sequence
  synthetic peptide
LIWIYGGGFQTGTSSLHVYDGKFLARVERVIV

SEQ ID NO: 15343 - protein, 32 aa, Artificial sequence
  synthetic peptide
IWIYGGGFQTGTSSLHVYDGKFLARVERVIVV

SEQ ID NO: 15344 - protein, 32 aa, Artificial sequence
  synthetic peptide
WIYGGGFQTGTSSLHVYDGKFLARVERVIVVS

SEQ ID NO: 15345 - protein, 32 aa, Artificial sequence
  synthetic peptide
IYGGGFQTGTSSLHVYDGKFLARVERVIVVSM

SEQ ID NO: 15346 - protein, 32 aa, Artificial sequence
  synthetic peptide
YGGGFQTGTSSLHVYDGKFLARVERVIVVSMN

SEQ ID NO: 15347 - protein, 32 aa, Artificial sequence
  synthetic peptide
GGGFQTGTSSLHVYDGKFLARVERVIVVSMNY

SEQ ID NO: 15348 - protein, 32 aa, Artificial sequence
  synthetic peptide
GGFQTGTSSLHVYDGKFLARVERVIVVSMNYR

SEQ ID NO: 15349 - protein, 32 aa, Artificial sequence
  synthetic peptide
GFQTGTSSLHVYDGKFLARVERVIVVSMNYRV

SEQ ID NO: 15350 - protein, 32 aa, Artificial sequence
  synthetic peptide
FQTGTSSLHVYDGKFLARVERVIVVSMNYRVG

SEQ ID NO: 15351 - protein, 32 aa, Artificial sequence
  synthetic peptide
QTGTSSLHVYDGKFLARVERVIVVSMNYRVGA

SEQ ID NO: 15352 - protein, 32 aa, Artificial sequence
  synthetic peptide
TGTSSLHVYDGKFLARVERVIVVSMNYRVGAL

SEQ ID NO: 15353 - protein, 32 aa, Artificial sequence
  synthetic peptide
GTSSLHVYDGKFLARVERVIVVSMNYRVGALG

SEQ ID NO: 15354 - protein, 32 aa, Artificial sequence
  synthetic peptide
TSSLHVYDGKFLARVERVIVVSMNYRVGALGF

SEQ ID NO: 15355 - protein, 32 aa, Artificial sequence
  synthetic peptide
SSLHVYDGKFLARVERVIVVSMNYRVGALGFL

SEQ ID NO: 15356 - protein, 32 aa, Artificial sequence
  synthetic peptide
SLHVYDGKFLARVERVIVVSMNYRVGALGFLA

SEQ ID NO: 15357 - protein, 32 aa, Artificial sequence
  synthetic peptide
LHVYDGKFLARVERVIVVSMNYRVGALGFLAL

SEQ ID NO: 15358 - protein, 32 aa, Artificial sequence
  synthetic peptide
HVYDGKFLARVERVIVVSMNYRVGALGFLALP

SEQ ID NO: 15359 - protein, 32 aa, Artificial sequence
  synthetic peptide
VYDGKFLARVERVIVVSMNYRVGALGFLALPG

SEQ ID NO: 15360 - protein, 32 aa, Artificial sequence
  synthetic peptide
YDGKFLARVERVIVVSMNYRVGALGFLALPGN

SEQ ID NO: 15361 - protein, 32 aa, Artificial sequence
  synthetic peptide
DGKFLARVERVIVVSMNYRVGALGFLALPGNP

SEQ ID NO: 15362 - protein, 32 aa, Artificial sequence
  synthetic peptide
GKFLARVERVIVVSMNYRVGALGFLALPGNPE

SEQ ID NO: 15363 - protein, 32 aa, Artificial sequence
  synthetic peptide
KFLARVERVIVVSMNYRVGALGFLALPGNPEA

SEQ ID NO: 15364 - protein, 32 aa, Artificial sequence
  synthetic peptide
FLARVERVIVVSMNYRVGALGFLALPGNPEAP

SEQ ID NO: 15365 - protein, 32 aa, Artificial sequence
  synthetic peptide
LARVERVIVVSMNYRVGALGFLALPGNPEAPG

SEQ ID NO: 15366 - protein, 32 aa, Artificial sequence
  synthetic peptide
ARVERVIVVSMNYRVGALGFLALPGNPEAPGN

SEQ ID NO: 15367 - protein, 32 aa, Artificial sequence
  synthetic peptide
RVERVIVVSMNYRVGALGFLALPGNPEAPGNM

SEQ ID NO: 15368 - protein, 32 aa, Artificial sequence
  synthetic peptide
VERVIVVSMNYRVGALGFLALPGNPEAPGNMG

SEQ ID NO: 15369 - protein, 32 aa, Artificial sequence
  synthetic peptide
ERVIVVSMNYRVGALGFLALPGNPEAPGNMGL

SEQ ID NO: 15370 - protein, 32 aa, Artificial sequence
  synthetic peptide
RVIVVSMNYRVGALGFLALPGNPEAPGNMGLF

SEQ ID NO: 15371 - protein, 32 aa, Artificial sequence
  synthetic peptide
VIVVSMNYRVGALGFLALPGNPEAPGNMGLFD

SEQ ID NO: 15372 - protein, 32 aa, Artificial sequence
  synthetic peptide
IVVSMNYRVGALGFLALPGNPEAPGNMGLFDQ

SEQ ID NO: 15373 - protein, 32 aa, Artificial sequence
  synthetic peptide
VVSMNYRVGALGFLALPGNPEAPGNMGLFDQQ

SEQ ID NO: 15374 - protein, 32 aa, Artificial sequence
  synthetic peptide
VSMNYRVGALGFLALPGNPEAPGNMGLFDQQL

SEQ ID NO: 15375 - protein, 32 aa, Artificial sequence
  synthetic peptide
SMNYRVGALGFLALPGNPEAPGNMGLFDQQLA

SEQ ID NO: 15376 - protein, 32 aa, Artificial sequence
  synthetic peptide
MNYRVGALGFLALPGNPEAPGNMGLFDQQLAL

SEQ ID NO: 15377 - protein, 32 aa, Artificial sequence
  synthetic peptide
NYRVGALGFLALPGNPEAPGNMGLFDQQLALQ

SEQ ID NO: 15378 - protein, 32 aa, Artificial sequence
  synthetic peptide
YRVGALGFLALPGNPEAPGNMGLFDQQLALQW

SEQ ID NO: 15379 - protein, 32 aa, Artificial sequence
  synthetic peptide
RVGALGFLALPGNPEAPGNMGLFDQQLALQWV

SEQ ID NO: 15380 - protein, 32 aa, Artificial sequence
  synthetic peptide
VGALGFLALPGNPEAPGNMGLFDQQLALQWVQ

SEQ ID NO: 15381 - protein, 32 aa, Artificial sequence
  synthetic peptide
GALGFLALPGNPEAPGNMGLFDQQLALQWVQK

SEQ ID NO: 15382 - protein, 32 aa, Artificial sequence
  synthetic peptide
ALGFLALPGNPEAPGNMGLFDQQLALQWVQKN

SEQ ID NO: 15383 - protein, 32 aa, Artificial sequence
  synthetic peptide
LGFLALPGNPEAPGNMGLFDQQLALQWVQKNI

SEQ ID NO: 15384 - protein, 32 aa, Artificial sequence
  synthetic peptide
GFLALPGNPEAPGNMGLFDQQLALQWVQKNIA

SEQ ID NO: 15385 - protein, 32 aa, Artificial sequence
  synthetic peptide
FLALPGNPEAPGNMGLFDQQLALQWVQKNIAA

SEQ ID NO: 15386 - protein, 32 aa, Artificial sequence
  synthetic peptide
LALPGNPEAPGNMGLFDQQLALQWVQKNIAAF

SEQ ID NO: 15387 - protein, 32 aa, Artificial sequence
  synthetic peptide
ALPGNPEAPGNMGLFDQQLALQWVQKNIAAFG

SEQ ID NO: 15388 - protein, 32 aa, Artificial sequence
  synthetic peptide
LPGNPEAPGNMGLFDQQLALQWVQKNIAAFGG

SEQ ID NO: 15389 - protein, 32 aa, Artificial sequence
  synthetic peptide
PGNPEAPGNMGLFDQQLALQWVQKNIAAFGGN

SEQ ID NO: 15390 - protein, 32 aa, Artificial sequence
  synthetic peptide
GNPEAPGNMGLFDQQLALQWVQKNIAAFGGNP

SEQ ID NO: 15391 - protein, 32 aa, Artificial sequence
  synthetic peptide
NPEAPGNMGLFDQQLALQWVQKNIAAFGGNPK

SEQ ID NO: 15392 - protein, 32 aa, Artificial sequence
  synthetic peptide
PEAPGNMGLFDQQLALQWVQKNIAAFGGNPKS

SEQ ID NO: 15393 - protein, 32 aa, Artificial sequence
  synthetic peptide
EAPGNMGLFDQQLALQWVQKNIAAFGGNPKSV

SEQ ID NO: 15394 - protein, 32 aa, Artificial sequence
  synthetic peptide
APGNMGLFDQQLALQWVQKNIAAFGGNPKSVT

SEQ ID NO: 15395 - protein, 32 aa, Artificial sequence
  synthetic peptide
PGNMGLFDQQLALQWVQKNIAAFGGNPKSVTL

SEQ ID NO: 15396 - protein, 32 aa, Artificial sequence
  synthetic peptide
GNMGLFDQQLALQWVQKNIAAFGGNPKSVTLF

SEQ ID NO: 15397 - protein, 32 aa, Artificial sequence
  synthetic peptide
NMGLFDQQLALQWVQKNIAAFGGNPKSVTLFG

SEQ ID NO: 15398 - protein, 32 aa, Artificial sequence
  synthetic peptide
MGLFDQQLALQWVQKNIAAFGGNPKSVTLFGE

SEQ ID NO: 15399 - protein, 32 aa, Artificial sequence
  synthetic peptide
GLFDQQLALQWVQKNIAAFGGNPKSVTLFGES

SEQ ID NO: 15400 - protein, 32 aa, Artificial sequence
  synthetic peptide
LFDQQLALQWVQKNIAAFGGNPKSVTLFGESA

SEQ ID NO: 15401 - protein, 32 aa, Artificial sequence
  synthetic peptide
FDQQLALQWVQKNIAAFGGNPKSVTLFGESAG

SEQ ID NO: 15402 - protein, 32 aa, Artificial sequence
  synthetic peptide
DQQLALQWVQKNIAAFGGNPKSVTLFGESAGA

SEQ ID NO: 15403 - protein, 32 aa, Artificial sequence
  synthetic peptide
QQLALQWVQKNIAAFGGNPKSVTLFGESAGAA

SEQ ID NO: 15404 - protein, 32 aa, Artificial sequence
  synthetic peptide
QLALQWVQKNIAAFGGNPKSVTLFGESAGAAS

SEQ ID NO: 15405 - protein, 32 aa, Artificial sequence
  synthetic peptide
LALQWVQKNIAAFGGNPKSVTLFGESAGAASV

SEQ ID NO: 15406 - protein, 32 aa, Artificial sequence
  synthetic peptide
ALQWVQKNIAAFGGNPKSVTLFGESAGAASVS

SEQ ID NO: 15407 - protein, 32 aa, Artificial sequence
  synthetic peptide
LQWVQKNIAAFGGNPKSVTLFGESAGAASVSL

SEQ ID NO: 15408 - protein, 32 aa, Artificial sequence
  synthetic peptide
QWVQKNIAAFGGNPKSVTLFGESAGAASVSLH

SEQ ID NO: 15409 - protein, 32 aa, Artificial sequence
  synthetic peptide
WVQKNIAAFGGNPKSVTLFGESAGAASVSLHL

SEQ ID NO: 15410 - protein, 32 aa, Artificial sequence
  synthetic peptide
VQKNIAAFGGNPKSVTLFGESAGAASVSLHLL

SEQ ID NO: 15411 - protein, 32 aa, Artificial sequence
  synthetic peptide
QKNIAAFGGNPKSVTLFGESAGAASVSLHLLS

SEQ ID NO: 15412 - protein, 32 aa, Artificial sequence
  synthetic peptide
KNIAAFGGNPKSVTLFGESAGAASVSLHLLSP

SEQ ID NO: 15413 - protein, 32 aa, Artificial sequence
  synthetic peptide
NIAAFGGNPKSVTLFGESAGAASVSLHLLSPG

SEQ ID NO: 15414 - protein, 32 aa, Artificial sequence
  synthetic peptide
IAAFGGNPKSVTLFGESAGAASVSLHLLSPGS

SEQ ID NO: 15415 - protein, 32 aa, Artificial sequence
  synthetic peptide
AAFGGNPKSVTLFGESAGAASVSLHLLSPGSH

SEQ ID NO: 15416 - protein, 32 aa, Artificial sequence
  synthetic peptide
AFGGNPKSVTLFGESAGAASVSLHLLSPGSHS

SEQ ID NO: 15417 - protein, 32 aa, Artificial sequence
  synthetic peptide
FGGNPKSVTLFGESAGAASVSLHLLSPGSHSL

SEQ ID NO: 15418 - protein, 32 aa, Artificial sequence
  synthetic peptide
GGNPKSVTLFGESAGAASVSLHLLSPGSHSLF

SEQ ID NO: 15419 - protein, 32 aa, Artificial sequence
  synthetic peptide
GNPKSVTLFGESAGAASVSLHLLSPGSHSLFT

SEQ ID NO: 15420 - protein, 32 aa, Artificial sequence
  synthetic peptide
NPKSVTLFGESAGAASVSLHLLSPGSHSLFTR

SEQ ID NO: 15421 - protein, 32 aa, Artificial sequence
  synthetic peptide
PKSVTLFGESAGAASVSLHLLSPGSHSLFTRA

SEQ ID NO: 15422 - protein, 32 aa, Artificial sequence
  synthetic peptide
KSVTLFGESAGAASVSLHLLSPGSHSLFTRAI

SEQ ID NO: 15423 - protein, 32 aa, Artificial sequence
  synthetic peptide
SVTLFGESAGAASVSLHLLSPGSHSLFTRAIL

SEQ ID NO: 15424 - protein, 32 aa, Artificial sequence
  synthetic peptide
VTLFGESAGAASVSLHLLSPGSHSLFTRAILQ

SEQ ID NO: 15425 - protein, 32 aa, Artificial sequence
  synthetic peptide
TLFGESAGAASVSLHLLSPGSHSLFTRAILQS

SEQ ID NO: 15426 - protein, 32 aa, Artificial sequence
  synthetic peptide
LFGESAGAASVSLHLLSPGSHSLFTRAILQSG

SEQ ID NO: 15427 - protein, 32 aa, Artificial sequence
  synthetic peptide
FGESAGAASVSLHLLSPGSHSLFTRAILQSGS

SEQ ID NO: 15428 - protein, 32 aa, Artificial sequence
  synthetic peptide
GESAGAASVSLHLLSPGSHSLFTRAILQSGSF

SEQ ID NO: 15429 - protein, 32 aa, Artificial sequence
  synthetic peptide
ESAGAASVSLHLLSPGSHSLFTRAILQSGSFN

SEQ ID NO: 15430 - protein, 32 aa, Artificial sequence
  synthetic peptide
SAGAASVSLHLLSPGSHSLFTRAILQSGSFNA

SEQ ID NO: 15431 - protein, 32 aa, Artificial sequence
  synthetic peptide
AGAASVSLHLLSPGSHSLFTRAILQSGSFNAP

SEQ ID NO: 15432 - protein, 32 aa, Artificial sequence
  synthetic peptide
GAASVSLHLLSPGSHSLFTRAILQSGSFNAPW

SEQ ID NO: 15433 - protein, 32 aa, Artificial sequence
  synthetic peptide
AASVSLHLLSPGSHSLFTRAILQSGSFNAPWA

SEQ ID NO: 15434 - protein, 32 aa, Artificial sequence
  synthetic peptide
ASVSLHLLSPGSHSLFTRAILQSGSFNAPWAV

SEQ ID NO: 15435 - protein, 32 aa, Artificial sequence
  synthetic peptide
SVSLHLLSPGSHSLFTRAILQSGSFNAPWAVT

SEQ ID NO: 15436 - protein, 32 aa, Artificial sequence
  synthetic peptide
VSLHLLSPGSHSLFTRAILQSGSFNAPWAVTS

SEQ ID NO: 15437 - protein, 32 aa, Artificial sequence
  synthetic peptide
SLHLLSPGSHSLFTRAILQSGSFNAPWAVTSL

SEQ ID NO: 15438 - protein, 32 aa, Artificial sequence
  synthetic peptide
LHLLSPGSHSLFTRAILQSGSFNAPWAVTSLY

SEQ ID NO: 15439 - protein, 32 aa, Artificial sequence
  synthetic peptide
HLLSPGSHSLFTRAILQSGSFNAPWAVTSLYE

SEQ ID NO: 15440 - protein, 32 aa, Artificial sequence
  synthetic peptide
LLSPGSHSLFTRAILQSGSFNAPWAVTSLYEA

SEQ ID NO: 15441 - protein, 32 aa, Artificial sequence
  synthetic peptide
LSPGSHSLFTRAILQSGSFNAPWAVTSLYEAR

SEQ ID NO: 15442 - protein, 32 aa, Artificial sequence
  synthetic peptide
SPGSHSLFTRAILQSGSFNAPWAVTSLYEARN

SEQ ID NO: 15443 - protein, 32 aa, Artificial sequence
  synthetic peptide
PGSHSLFTRAILQSGSFNAPWAVTSLYEARNR

SEQ ID NO: 15444 - protein, 32 aa, Artificial sequence
  synthetic peptide
GSHSLFTRAILQSGSFNAPWAVTSLYEARNRT

SEQ ID NO: 15445 - protein, 32 aa, Artificial sequence
  synthetic peptide
SHSLFTRAILQSGSFNAPWAVTSLYEARNRTL

SEQ ID NO: 15446 - protein, 32 aa, Artificial sequence
  synthetic peptide
HSLFTRAILQSGSFNAPWAVTSLYEARNRTLN

SEQ ID NO: 15447 - protein, 32 aa, Artificial sequence
  synthetic peptide
SLFTRAILQSGSFNAPWAVTSLYEARNRTLNL

SEQ ID NO: 15448 - protein, 32 aa, Artificial sequence
  synthetic peptide
LFTRAILQSGSFNAPWAVTSLYEARNRTLNLA

SEQ ID NO: 15449 - protein, 32 aa, Artificial sequence
  synthetic peptide
FTRAILQSGSFNAPWAVTSLYEARNRTLNLAK

SEQ ID NO: 15450 - protein, 32 aa, Artificial sequence
  synthetic peptide
TRAILQSGSFNAPWAVTSLYEARNRTLNLAKL

SEQ ID NO: 15451 - protein, 32 aa, Artificial sequence
  synthetic peptide
RAILQSGSFNAPWAVTSLYEARNRTLNLAKLT

SEQ ID NO: 15452 - protein, 32 aa, Artificial sequence
  synthetic peptide
AILQSGSFNAPWAVTSLYEARNRTLNLAKLTG

SEQ ID NO: 15453 - protein, 32 aa, Artificial sequence
  synthetic peptide
ILQSGSFNAPWAVTSLYEARNRTLNLAKLTGC

SEQ ID NO: 15454 - protein, 32 aa, Artificial sequence
  synthetic peptide
LQSGSFNAPWAVTSLYEARNRTLNLAKLTGCS

SEQ ID NO: 15455 - protein, 32 aa, Artificial sequence
  synthetic peptide
QSGSFNAPWAVTSLYEARNRTLNLAKLTGCSR

SEQ ID NO: 15456 - protein, 32 aa, Artificial sequence
  synthetic peptide
SGSFNAPWAVTSLYEARNRTLNLAKLTGCSRE

SEQ ID NO: 15457 - protein, 32 aa, Artificial sequence
  synthetic peptide
GSFNAPWAVTSLYEARNRTLNLAKLTGCSREN

SEQ ID NO: 15458 - protein, 32 aa, Artificial sequence
  synthetic peptide
SFNAPWAVTSLYEARNRTLNLAKLTGCSRENE

SEQ ID NO: 15459 - protein, 32 aa, Artificial sequence
  synthetic peptide
FNAPWAVTSLYEARNRTLNLAKLTGCSRENET

SEQ ID NO: 15460 - protein, 32 aa, Artificial sequence
  synthetic peptide
NAPWAVTSLYEARNRTLNLAKLTGCSRENETE

SEQ ID NO: 15461 - protein, 32 aa, Artificial sequence
  synthetic peptide
APWAVTSLYEARNRTLNLAKLTGCSRENETEI

SEQ ID NO: 15462 - protein, 32 aa, Artificial sequence
  synthetic peptide
PWAVTSLYEARNRTLNLAKLTGCSRENETEII

SEQ ID NO: 15463 - protein, 32 aa, Artificial sequence
  synthetic peptide
WAVTSLYEARNRTLNLAKLTGCSRENETEIIK

SEQ ID NO: 15464 - protein, 32 aa, Artificial sequence
  synthetic peptide
AVTSLYEARNRTLNLAKLTGCSRENETEIIKC

SEQ ID NO: 15465 - protein, 32 aa, Artificial sequence
  synthetic peptide
VTSLYEARNRTLNLAKLTGCSRENETEIIKCL

SEQ ID NO: 15466 - protein, 32 aa, Artificial sequence
  synthetic peptide
TSLYEARNRTLNLAKLTGCSRENETEIIKCLR

SEQ ID NO: 15467 - protein, 32 aa, Artificial sequence
  synthetic peptide
SLYEARNRTLNLAKLTGCSRENETEIIKCLRN

SEQ ID NO: 15468 - protein, 32 aa, Artificial sequence
  synthetic peptide
LYEARNRTLNLAKLTGCSRENETEIIKCLRNK

SEQ ID NO: 15469 - protein, 32 aa, Artificial sequence
  synthetic peptide
YEARNRTLNLAKLTGCSRENETEIIKCLRNKD

SEQ ID NO: 15470 - protein, 32 aa, Artificial sequence
  synthetic peptide
EARNRTLNLAKLTGCSRENETEIIKCLRNKDP

SEQ ID NO: 15471 - protein, 32 aa, Artificial sequence
  synthetic peptide
ARNRTLNLAKLTGCSRENETEIIKCLRNKDPQ

SEQ ID NO: 15472 - protein, 32 aa, Artificial sequence
  synthetic peptide
RNRTLNLAKLTGCSRENETEIIKCLRNKDPQE

SEQ ID NO: 15473 - protein, 32 aa, Artificial sequence
  synthetic peptide
NRTLNLAKLTGCSRENETEIIKCLRNKDPQEI

SEQ ID NO: 15474 - protein, 32 aa, Artificial sequence
  synthetic peptide
RTLNLAKLTGCSRENETEIIKCLRNKDPQEIL

SEQ ID NO: 15475 - protein, 32 aa, Artificial sequence
  synthetic peptide
TLNLAKLTGCSRENETEIIKCLRNKDPQEILL

SEQ ID NO: 15476 - protein, 32 aa, Artificial sequence
  synthetic peptide
LNLAKLTGCSRENETEIIKCLRNKDPQEILLN

SEQ ID NO: 15477 - protein, 32 aa, Artificial sequence
  synthetic peptide
NLAKLTGCSRENETEIIKCLRNKDPQEILLNE

SEQ ID NO: 15478 - protein, 32 aa, Artificial sequence
  synthetic peptide
LAKLTGCSRENETEIIKCLRNKDPQEILLNEA

SEQ ID NO: 15479 - protein, 32 aa, Artificial sequence
  synthetic peptide
AKLTGCSRENETEIIKCLRNKDPQEILLNEAF

SEQ ID NO: 15480 - protein, 32 aa, Artificial sequence
  synthetic peptide
KLTGCSRENETEIIKCLRNKDPQEILLNEAFV

SEQ ID NO: 15481 - protein, 32 aa, Artificial sequence
  synthetic peptide
LTGCSRENETEIIKCLRNKDPQEILLNEAFVV

SEQ ID NO: 15482 - protein, 32 aa, Artificial sequence
  synthetic peptide
TGCSRENETEIIKCLRNKDPQEILLNEAFVVP

SEQ ID NO: 15483 - protein, 32 aa, Artificial sequence
  synthetic peptide
GCSRENETEIIKCLRNKDPQEILLNEAFVVPY

SEQ ID NO: 15484 - protein, 32 aa, Artificial sequence
  synthetic peptide
CSRENETEIIKCLRNKDPQEILLNEAFVVPYG

SEQ ID NO: 15485 - protein, 32 aa, Artificial sequence
  synthetic peptide
SRENETEIIKCLRNKDPQEILLNEAFVVPYGT

SEQ ID NO: 15486 - protein, 32 aa, Artificial sequence
  synthetic peptide
RENETEIIKCLRNKDPQEILLNEAFVVPYGTP

SEQ ID NO: 15487 - protein, 32 aa, Artificial sequence
  synthetic peptide
ENETEIIKCLRNKDPQEILLNEAFVVPYGTPL

SEQ ID NO: 15488 - protein, 32 aa, Artificial sequence
  synthetic peptide
NETEIIKCLRNKDPQEILLNEAFVVPYGTPLS

SEQ ID NO: 15489 - protein, 32 aa, Artificial sequence
  synthetic peptide
ETEIIKCLRNKDPQEILLNEAFVVPYGTPLSV

SEQ ID NO: 15490 - protein, 32 aa, Artificial sequence
  synthetic peptide
TEIIKCLRNKDPQEILLNEAFVVPYGTPLSVN

SEQ ID NO: 15491 - protein, 32 aa, Artificial sequence
  synthetic peptide
EIIKCLRNKDPQEILLNEAFVVPYGTPLSVNF

SEQ ID NO: 15492 - protein, 32 aa, Artificial sequence
  synthetic peptide
IIKCLRNKDPQEILLNEAFVVPYGTPLSVNFG

SEQ ID NO: 15493 - protein, 32 aa, Artificial sequence
  synthetic peptide
IKCLRNKDPQEILLNEAFVVPYGTPLSVNFGP

SEQ ID NO: 15494 - protein, 32 aa, Artificial sequence
  synthetic peptide
KCLRNKDPQEILLNEAFVVPYGTPLSVNFGPT

SEQ ID NO: 15495 - protein, 32 aa, Artificial sequence
  synthetic peptide
CLRNKDPQEILLNEAFVVPYGTPLSVNFGPTV

SEQ ID NO: 15496 - protein, 32 aa, Artificial sequence
  synthetic peptide
LRNKDPQEILLNEAFVVPYGTPLSVNFGPTVD

SEQ ID NO: 15497 - protein, 32 aa, Artificial sequence
  synthetic peptide
RNKDPQEILLNEAFVVPYGTPLSVNFGPTVDG

SEQ ID NO: 15498 - protein, 32 aa, Artificial sequence
  synthetic peptide
NKDPQEILLNEAFVVPYGTPLSVNFGPTVDGD

SEQ ID NO: 15499 - protein, 32 aa, Artificial sequence
  synthetic peptide
KDPQEILLNEAFVVPYGTPLSVNFGPTVDGDF

SEQ ID NO: 15500 - protein, 32 aa, Artificial sequence
  synthetic peptide
DPQEILLNEAFVVPYGTPLSVNFGPTVDGDFL

SEQ ID NO: 15501 - protein, 32 aa, Artificial sequence
  synthetic peptide
PQEILLNEAFVVPYGTPLSVNFGPTVDGDFLT

SEQ ID NO: 15502 - protein, 32 aa, Artificial sequence
  synthetic peptide
QEILLNEAFVVPYGTPLSVNFGPTVDGDFLTD

SEQ ID NO: 15503 - protein, 32 aa, Artificial sequence
  synthetic peptide
EILLNEAFVVPYGTPLSVNFGPTVDGDFLTDM

SEQ ID NO: 15504 - protein, 32 aa, Artificial sequence
  synthetic peptide
ILLNEAFVVPYGTPLSVNFGPTVDGDFLTDMP

SEQ ID NO: 15505 - protein, 32 aa, Artificial sequence
  synthetic peptide
LLNEAFVVPYGTPLSVNFGPTVDGDFLTDMPD

SEQ ID NO: 15506 - protein, 32 aa, Artificial sequence
  synthetic peptide
LNEAFVVPYGTPLSVNFGPTVDGDFLTDMPDI

SEQ ID NO: 15507 - protein, 32 aa, Artificial sequence
  synthetic peptide
NEAFVVPYGTPLSVNFGPTVDGDFLTDMPDIL

SEQ ID NO: 15508 - protein, 32 aa, Artificial sequence
  synthetic peptide
EAFVVPYGTPLSVNFGPTVDGDFLTDMPDILL

SEQ ID NO: 15509 - protein, 32 aa, Artificial sequence
  synthetic peptide
AFVVPYGTPLSVNFGPTVDGDFLTDMPDILLE

SEQ ID NO: 15510 - protein, 32 aa, Artificial sequence
  synthetic peptide
FVVPYGTPLSVNFGPTVDGDFLTDMPDILLEL

SEQ ID NO: 15511 - protein, 32 aa, Artificial sequence
  synthetic peptide
VVPYGTPLSVNFGPTVDGDFLTDMPDILLELG

SEQ ID NO: 15512 - protein, 32 aa, Artificial sequence
  synthetic peptide
VPYGTPLSVNFGPTVDGDFLTDMPDILLELGQ

SEQ ID NO: 15513 - protein, 32 aa, Artificial sequence
  synthetic peptide
PYGTPLSVNFGPTVDGDFLTDMPDILLELGQF

SEQ ID NO: 15514 - protein, 32 aa, Artificial sequence
  synthetic peptide
YGTPLSVNFGPTVDGDFLTDMPDILLELGQFK

SEQ ID NO: 15515 - protein, 32 aa, Artificial sequence
  synthetic peptide
GTPLSVNFGPTVDGDFLTDMPDILLELGQFKK

SEQ ID NO: 15516 - protein, 32 aa, Artificial sequence
  synthetic peptide
TPLSVNFGPTVDGDFLTDMPDILLELGQFKKT

SEQ ID NO: 15517 - protein, 32 aa, Artificial sequence
  synthetic peptide
PLSVNFGPTVDGDFLTDMPDILLELGQFKKTQ

SEQ ID NO: 15518 - protein, 32 aa, Artificial sequence
  synthetic peptide
LSVNFGPTVDGDFLTDMPDILLELGQFKKTQI

SEQ ID NO: 15519 - protein, 32 aa, Artificial sequence
  synthetic peptide
SVNFGPTVDGDFLTDMPDILLELGQFKKTQIL

SEQ ID NO: 15520 - protein, 32 aa, Artificial sequence
  synthetic peptide
VNFGPTVDGDFLTDMPDILLELGQFKKTQILV

SEQ ID NO: 15521 - protein, 32 aa, Artificial sequence
  synthetic peptide
NFGPTVDGDFLTDMPDILLELGQFKKTQILVG

SEQ ID NO: 15522 - protein, 32 aa, Artificial sequence
  synthetic peptide
FGPTVDGDFLTDMPDILLELGQFKKTQILVGV

SEQ ID NO: 15523 - protein, 32 aa, Artificial sequence
  synthetic peptide
GPTVDGDFLTDMPDILLELGQFKKTQILVGVN

SEQ ID NO: 15524 - protein, 32 aa, Artificial sequence
  synthetic peptide
PTVDGDFLTDMPDILLELGQFKKTQILVGVNK

SEQ ID NO: 15525 - protein, 32 aa, Artificial sequence
  synthetic peptide
TVDGDFLTDMPDILLELGQFKKTQILVGVNKD

SEQ ID NO: 15526 - protein, 32 aa, Artificial sequence
  synthetic peptide
VDGDFLTDMPDILLELGQFKKTQILVGVNKDE

SEQ ID NO: 15527 - protein, 32 aa, Artificial sequence
  synthetic peptide
DGDFLTDMPDILLELGQFKKTQILVGVNKDEG

SEQ ID NO: 15528 - protein, 32 aa, Artificial sequence
  synthetic peptide
GDFLTDMPDILLELGQFKKTQILVGVNKDEGT

SEQ ID NO: 15529 - protein, 32 aa, Artificial sequence
  synthetic peptide
DFLTDMPDILLELGQFKKTQILVGVNKDEGTA

SEQ ID NO: 15530 - protein, 32 aa, Artificial sequence
  synthetic peptide
FLTDMPDILLELGQFKKTQILVGVNKDEGTAF

SEQ ID NO: 15531 - protein, 32 aa, Artificial sequence
  synthetic peptide
LTDMPDILLELGQFKKTQILVGVNKDEGTAFL

SEQ ID NO: 15532 - protein, 32 aa, Artificial sequence
  synthetic peptide
TDMPDILLELGQFKKTQILVGVNKDEGTAFLV

SEQ ID NO: 15533 - protein, 32 aa, Artificial sequence
  synthetic peptide
DMPDILLELGQFKKTQILVGVNKDEGTAFLVY

SEQ ID NO: 15534 - protein, 32 aa, Artificial sequence
  synthetic peptide
MPDILLELGQFKKTQILVGVNKDEGTAFLVYG

SEQ ID NO: 15535 - protein, 32 aa, Artificial sequence
  synthetic peptide
PDILLELGQFKKTQILVGVNKDEGTAFLVYGA

SEQ ID NO: 15536 - protein, 32 aa, Artificial sequence
  synthetic peptide
DILLELGQFKKTQILVGVNKDEGTAFLVYGAP

SEQ ID NO: 15537 - protein, 32 aa, Artificial sequence
  synthetic peptide
ILLELGQFKKTQILVGVNKDEGTAFLVYGAPG

SEQ ID NO: 15538 - protein, 32 aa, Artificial sequence
  synthetic peptide
LLELGQFKKTQILVGVNKDEGTAFLVYGAPGF

SEQ ID NO: 15539 - protein, 32 aa, Artificial sequence
  synthetic peptide
LELGQFKKTQILVGVNKDEGTAFLVYGAPGFS

SEQ ID NO: 15540 - protein, 32 aa, Artificial sequence
  synthetic peptide
ELGQFKKTQILVGVNKDEGTAFLVYGAPGFSK

SEQ ID NO: 15541 - protein, 32 aa, Artificial sequence
  synthetic peptide
LGQFKKTQILVGVNKDEGTAFLVYGAPGFSKD

SEQ ID NO: 15542 - protein, 32 aa, Artificial sequence
  synthetic peptide
GQFKKTQILVGVNKDEGTAFLVYGAPGFSKDN

SEQ ID NO: 15543 - protein, 32 aa, Artificial sequence
  synthetic peptide
QFKKTQILVGVNKDEGTAFLVYGAPGFSKDNN

SEQ ID NO: 15544 - protein, 32 aa, Artificial sequence
  synthetic peptide
FKKTQILVGVNKDEGTAFLVYGAPGFSKDNNS

SEQ ID NO: 15545 - protein, 32 aa, Artificial sequence
  synthetic peptide
KKTQILVGVNKDEGTAFLVYGAPGFSKDNNSI

SEQ ID NO: 15546 - protein, 32 aa, Artificial sequence
  synthetic peptide
KTQILVGVNKDEGTAFLVYGAPGFSKDNNSII

SEQ ID NO: 15547 - protein, 32 aa, Artificial sequence
  synthetic peptide
TQILVGVNKDEGTAFLVYGAPGFSKDNNSIIT

SEQ ID NO: 15548 - protein, 32 aa, Artificial sequence
  synthetic peptide
QILVGVNKDEGTAFLVYGAPGFSKDNNSIITR

SEQ ID NO: 15549 - protein, 32 aa, Artificial sequence
  synthetic peptide
ILVGVNKDEGTAFLVYGAPGFSKDNNSIITRK

SEQ ID NO: 15550 - protein, 32 aa, Artificial sequence
  synthetic peptide
LVGVNKDEGTAFLVYGAPGFSKDNNSIITRKE

SEQ ID NO: 15551 - protein, 32 aa, Artificial sequence
  synthetic peptide
VGVNKDEGTAFLVYGAPGFSKDNNSIITRKEF

SEQ ID NO: 15552 - protein, 32 aa, Artificial sequence
  synthetic peptide
GVNKDEGTAFLVYGAPGFSKDNNSIITRKEFQ

SEQ ID NO: 15553 - protein, 32 aa, Artificial sequence
  synthetic peptide
VNKDEGTAFLVYGAPGFSKDNNSIITRKEFQE

SEQ ID NO: 15554 - protein, 32 aa, Artificial sequence
  synthetic peptide
NKDEGTAFLVYGAPGFSKDNNSIITRKEFQEG

SEQ ID NO: 15555 - protein, 32 aa, Artificial sequence
  synthetic peptide
KDEGTAFLVYGAPGFSKDNNSIITRKEFQEGL

SEQ ID NO: 15556 - protein, 32 aa, Artificial sequence
  synthetic peptide
DEGTAFLVYGAPGFSKDNNSIITRKEFQEGLK

SEQ ID NO: 15557 - protein, 32 aa, Artificial sequence
  synthetic peptide
EGTAFLVYGAPGFSKDNNSIITRKEFQEGLKI

SEQ ID NO: 15558 - protein, 32 aa, Artificial sequence
  synthetic peptide
GTAFLVYGAPGFSKDNNSIITRKEFQEGLKIF

SEQ ID NO: 15559 - protein, 32 aa, Artificial sequence
  synthetic peptide
TAFLVYGAPGFSKDNNSIITRKEFQEGLKIFF

SEQ ID NO: 15560 - protein, 32 aa, Artificial sequence
  synthetic peptide
AFLVYGAPGFSKDNNSIITRKEFQEGLKIFFP

SEQ ID NO: 15561 - protein, 32 aa, Artificial sequence
  synthetic peptide
FLVYGAPGFSKDNNSIITRKEFQEGLKIFFPG

SEQ ID NO: 15562 - protein, 32 aa, Artificial sequence
  synthetic peptide
LVYGAPGFSKDNNSIITRKEFQEGLKIFFPGV

SEQ ID NO: 15563 - protein, 32 aa, Artificial sequence
  synthetic peptide
VYGAPGFSKDNNSIITRKEFQEGLKIFFPGVS

SEQ ID NO: 15564 - protein, 32 aa, Artificial sequence
  synthetic peptide
YGAPGFSKDNNSIITRKEFQEGLKIFFPGVSE

SEQ ID NO: 15565 - protein, 32 aa, Artificial sequence
  synthetic peptide
GAPGFSKDNNSIITRKEFQEGLKIFFPGVSEF

SEQ ID NO: 15566 - protein, 32 aa, Artificial sequence
  synthetic peptide
APGFSKDNNSIITRKEFQEGLKIFFPGVSEFG

SEQ ID NO: 15567 - protein, 32 aa, Artificial sequence
  synthetic peptide
PGFSKDNNSIITRKEFQEGLKIFFPGVSEFGK

SEQ ID NO: 15568 - protein, 32 aa, Artificial sequence
  synthetic peptide
GFSKDNNSIITRKEFQEGLKIFFPGVSEFGKE

SEQ ID NO: 15569 - protein, 32 aa, Artificial sequence
  synthetic peptide
FSKDNNSIITRKEFQEGLKIFFPGVSEFGKES

SEQ ID NO: 15570 - protein, 32 aa, Artificial sequence
  synthetic peptide
SKDNNSIITRKEFQEGLKIFFPGVSEFGKESI

SEQ ID NO: 15571 - protein, 32 aa, Artificial sequence
  synthetic peptide
KDNNSIITRKEFQEGLKIFFPGVSEFGKESIL

SEQ ID NO: 15572 - protein, 32 aa, Artificial sequence
  synthetic peptide
DNNSIITRKEFQEGLKIFFPGVSEFGKESILF

SEQ ID NO: 15573 - protein, 32 aa, Artificial sequence
  synthetic peptide
NNSIITRKEFQEGLKIFFPGVSEFGKESILFH

SEQ ID NO: 15574 - protein, 32 aa, Artificial sequence
  synthetic peptide
NSIITRKEFQEGLKIFFPGVSEFGKESILFHY

SEQ ID NO: 15575 - protein, 32 aa, Artificial sequence
  synthetic peptide
SIITRKEFQEGLKIFFPGVSEFGKESILFHYT

SEQ ID NO: 15576 - protein, 32 aa, Artificial sequence
  synthetic peptide
IITRKEFQEGLKIFFPGVSEFGKESILFHYTD

SEQ ID NO: 15577 - protein, 32 aa, Artificial sequence
  synthetic peptide
ITRKEFQEGLKIFFPGVSEFGKESILFHYTDW

SEQ ID NO: 15578 - protein, 32 aa, Artificial sequence
  synthetic peptide
TRKEFQEGLKIFFPGVSEFGKESILFHYTDWV

SEQ ID NO: 15579 - protein, 32 aa, Artificial sequence
  synthetic peptide
RKEFQEGLKIFFPGVSEFGKESILFHYTDWVD

SEQ ID NO: 15580 - protein, 32 aa, Artificial sequence
  synthetic peptide
KEFQEGLKIFFPGVSEFGKESILFHYTDWVDD

SEQ ID NO: 15581 - protein, 32 aa, Artificial sequence
  synthetic peptide
EFQEGLKIFFPGVSEFGKESILFHYTDWVDDQ

SEQ ID NO: 15582 - protein, 32 aa, Artificial sequence
  synthetic peptide
FQEGLKIFFPGVSEFGKESILFHYTDWVDDQR

SEQ ID NO: 15583 - protein, 32 aa, Artificial sequence
  synthetic peptide
QEGLKIFFPGVSEFGKESILFHYTDWVDDQRP

SEQ ID NO: 15584 - protein, 32 aa, Artificial sequence
  synthetic peptide
EGLKIFFPGVSEFGKESILFHYTDWVDDQRPE

SEQ ID NO: 15585 - protein, 32 aa, Artificial sequence
  synthetic peptide
GLKIFFPGVSEFGKESILFHYTDWVDDQRPEN

SEQ ID NO: 15586 - protein, 32 aa, Artificial sequence
  synthetic peptide
LKIFFPGVSEFGKESILFHYTDWVDDQRPENY

SEQ ID NO: 15587 - protein, 32 aa, Artificial sequence
  synthetic peptide
KIFFPGVSEFGKESILFHYTDWVDDQRPENYR

SEQ ID NO: 15588 - protein, 32 aa, Artificial sequence
  synthetic peptide
IFFPGVSEFGKESILFHYTDWVDDQRPENYRE

SEQ ID NO: 15589 - protein, 32 aa, Artificial sequence
  synthetic peptide
FFPGVSEFGKESILFHYTDWVDDQRPENYREA

SEQ ID NO: 15590 - protein, 32 aa, Artificial sequence
  synthetic peptide
FPGVSEFGKESILFHYTDWVDDQRPENYREAL

SEQ ID NO: 15591 - protein, 32 aa, Artificial sequence
  synthetic peptide
PGVSEFGKESILFHYTDWVDDQRPENYREALG

SEQ ID NO: 15592 - protein, 32 aa, Artificial sequence
  synthetic peptide
GVSEFGKESILFHYTDWVDDQRPENYREALGD

SEQ ID NO: 15593 - protein, 32 aa, Artificial sequence
  synthetic peptide
VSEFGKESILFHYTDWVDDQRPENYREALGDV

SEQ ID NO: 15594 - protein, 32 aa, Artificial sequence
  synthetic peptide
SEFGKESILFHYTDWVDDQRPENYREALGDVV

SEQ ID NO: 15595 - protein, 32 aa, Artificial sequence
  synthetic peptide
EFGKESILFHYTDWVDDQRPENYREALGDVVG

SEQ ID NO: 15596 - protein, 32 aa, Artificial sequence
  synthetic peptide
FGKESILFHYTDWVDDQRPENYREALGDVVGD

SEQ ID NO: 15597 - protein, 32 aa, Artificial sequence
  synthetic peptide
GKESILFHYTDWVDDQRPENYREALGDVVGDY

SEQ ID NO: 15598 - protein, 32 aa, Artificial sequence
  synthetic peptide
KESILFHYTDWVDDQRPENYREALGDVVGDYN

SEQ ID NO: 15599 - protein, 32 aa, Artificial sequence
  synthetic peptide
ESILFHYTDWVDDQRPENYREALGDVVGDYNF

SEQ ID NO: 15600 - protein, 32 aa, Artificial sequence
  synthetic peptide
SILFHYTDWVDDQRPENYREALGDVVGDYNFI

SEQ ID NO: 15601 - protein, 32 aa, Artificial sequence
  synthetic peptide
ILFHYTDWVDDQRPENYREALGDVVGDYNFIC

SEQ ID NO: 15602 - protein, 32 aa, Artificial sequence
  synthetic peptide
LFHYTDWVDDQRPENYREALGDVVGDYNFICP

SEQ ID NO: 15603 - protein, 32 aa, Artificial sequence
  synthetic peptide
FHYTDWVDDQRPENYREALGDVVGDYNFICPA

SEQ ID NO: 15604 - protein, 32 aa, Artificial sequence
  synthetic peptide
HYTDWVDDQRPENYREALGDVVGDYNFICPAL

SEQ ID NO: 15605 - protein, 32 aa, Artificial sequence
  synthetic peptide
YTDWVDDQRPENYREALGDVVGDYNFICPALE

SEQ ID NO: 15606 - protein, 32 aa, Artificial sequence
  synthetic peptide
TDWVDDQRPENYREALGDVVGDYNFICPALEF

SEQ ID NO: 15607 - protein, 32 aa, Artificial sequence
  synthetic peptide
DWVDDQRPENYREALGDVVGDYNFICPALEFT

SEQ ID NO: 15608 - protein, 32 aa, Artificial sequence
  synthetic peptide
WVDDQRPENYREALGDVVGDYNFICPALEFTK

SEQ ID NO: 15609 - protein, 32 aa, Artificial sequence
  synthetic peptide
VDDQRPENYREALGDVVGDYNFICPALEFTKK

SEQ ID NO: 15610 - protein, 32 aa, Artificial sequence
  synthetic peptide
DDQRPENYREALGDVVGDYNFICPALEFTKKF

SEQ ID NO: 15611 - protein, 32 aa, Artificial sequence
  synthetic peptide
DQRPENYREALGDVVGDYNFICPALEFTKKFS

SEQ ID NO: 15612 - protein, 32 aa, Artificial sequence
  synthetic peptide
QRPENYREALGDVVGDYNFICPALEFTKKFSE

SEQ ID NO: 15613 - protein, 32 aa, Artificial sequence
  synthetic peptide
RPENYREALGDVVGDYNFICPALEFTKKFSEW

SEQ ID NO: 15614 - protein, 32 aa, Artificial sequence
  synthetic peptide
PENYREALGDVVGDYNFICPALEFTKKFSEWG

SEQ ID NO: 15615 - protein, 32 aa, Artificial sequence
  synthetic peptide
ENYREALGDVVGDYNFICPALEFTKKFSEWGN

SEQ ID NO: 15616 - protein, 32 aa, Artificial sequence
  synthetic peptide
NYREALGDVVGDYNFICPALEFTKKFSEWGNN

SEQ ID NO: 15617 - protein, 32 aa, Artificial sequence
  synthetic peptide
YREALGDVVGDYNFICPALEFTKKFSEWGNNA

SEQ ID NO: 15618 - protein, 32 aa, Artificial sequence
  synthetic peptide
REALGDVVGDYNFICPALEFTKKFSEWGNNAF

SEQ ID NO: 15619 - protein, 32 aa, Artificial sequence
  synthetic peptide
EALGDVVGDYNFICPALEFTKKFSEWGNNAFF

SEQ ID NO: 15620 - protein, 32 aa, Artificial sequence
  synthetic peptide
ALGDVVGDYNFICPALEFTKKFSEWGNNAFFY

SEQ ID NO: 15621 - protein, 32 aa, Artificial sequence
  synthetic peptide
LGDVVGDYNFICPALEFTKKFSEWGNNAFFYY

SEQ ID NO: 15622 - protein, 32 aa, Artificial sequence
  synthetic peptide
GDVVGDYNFICPALEFTKKFSEWGNNAFFYYF

SEQ ID NO: 15623 - protein, 32 aa, Artificial sequence
  synthetic peptide
DVVGDYNFICPALEFTKKFSEWGNNAFFYYFE

SEQ ID NO: 15624 - protein, 32 aa, Artificial sequence
  synthetic peptide
VVGDYNFICPALEFTKKFSEWGNNAFFYYFEH

SEQ ID NO: 15625 - protein, 32 aa, Artificial sequence
  synthetic peptide
VGDYNFICPALEFTKKFSEWGNNAFFYYFEHR

SEQ ID NO: 15626 - protein, 32 aa, Artificial sequence
  synthetic peptide
GDYNFICPALEFTKKFSEWGNNAFFYYFEHRS

SEQ ID NO: 15627 - protein, 32 aa, Artificial sequence
  synthetic peptide
DYNFICPALEFTKKFSEWGNNAFFYYFEHRSS

SEQ ID NO: 15628 - protein, 32 aa, Artificial sequence
  synthetic peptide
YNFICPALEFTKKFSEWGNNAFFYYFEHRSSK

SEQ ID NO: 15629 - protein, 32 aa, Artificial sequence
  synthetic peptide
NFICPALEFTKKFSEWGNNAFFYYFEHRSSKL

SEQ ID NO: 15630 - protein, 32 aa, Artificial sequence
  synthetic peptide
FICPALEFTKKFSEWGNNAFFYYFEHRSSKLP

SEQ ID NO: 15631 - protein, 32 aa, Artificial sequence
  synthetic peptide
ICPALEFTKKFSEWGNNAFFYYFEHRSSKLPW

SEQ ID NO: 15632 - protein, 32 aa, Artificial sequence
  synthetic peptide
CPALEFTKKFSEWGNNAFFYYFEHRSSKLPWP

SEQ ID NO: 15633 - protein, 32 aa, Artificial sequence
  synthetic peptide
PALEFTKKFSEWGNNAFFYYFEHRSSKLPWPE

SEQ ID NO: 15634 - protein, 32 aa, Artificial sequence
  synthetic peptide
ALEFTKKFSEWGNNAFFYYFEHRSSKLPWPEW

SEQ ID NO: 15635 - protein, 32 aa, Artificial sequence
  synthetic peptide
LEFTKKFSEWGNNAFFYYFEHRSSKLPWPEWM

SEQ ID NO: 15636 - protein, 32 aa, Artificial sequence
  synthetic peptide
EFTKKFSEWGNNAFFYYFEHRSSKLPWPEWMG

SEQ ID NO: 15637 - protein, 32 aa, Artificial sequence
  synthetic peptide
FTKKFSEWGNNAFFYYFEHRSSKLPWPEWMGV

SEQ ID NO: 15638 - protein, 32 aa, Artificial sequence
  synthetic peptide
TKKFSEWGNNAFFYYFEHRSSKLPWPEWMGVM

SEQ ID NO: 15639 - protein, 32 aa, Artificial sequence
  synthetic peptide
KKFSEWGNNAFFYYFEHRSSKLPWPEWMGVMH

SEQ ID NO: 15640 - protein, 32 aa, Artificial sequence
  synthetic peptide
KFSEWGNNAFFYYFEHRSSKLPWPEWMGVMHG

SEQ ID NO: 15641 - protein, 32 aa, Artificial sequence
  synthetic peptide
FSEWGNNAFFYYFEHRSSKLPWPEWMGVMHGY

SEQ ID NO: 15642 - protein, 32 aa, Artificial sequence
  synthetic peptide
SEWGNNAFFYYFEHRSSKLPWPEWMGVMHGYE

SEQ ID NO: 15643 - protein, 32 aa, Artificial sequence
  synthetic peptide
EWGNNAFFYYFEHRSSKLPWPEWMGVMHGYEI

SEQ ID NO: 15644 - protein, 32 aa, Artificial sequence
  synthetic peptide
WGNNAFFYYFEHRSSKLPWPEWMGVMHGYEIE

SEQ ID NO: 15645 - protein, 32 aa, Artificial sequence
  synthetic peptide
GNNAFFYYFEHRSSKLPWPEWMGVMHGYEIEF

SEQ ID NO: 15646 - protein, 32 aa, Artificial sequence
  synthetic peptide
NNAFFYYFEHRSSKLPWPEWMGVMHGYEIEFV

SEQ ID NO: 15647 - protein, 32 aa, Artificial sequence
  synthetic peptide
NAFFYYFEHRSSKLPWPEWMGVMHGYEIEFVF

SEQ ID NO: 15648 - protein, 32 aa, Artificial sequence
  synthetic peptide
AFFYYFEHRSSKLPWPEWMGVMHGYEIEFVFG

SEQ ID NO: 15649 - protein, 32 aa, Artificial sequence
  synthetic peptide
FFYYFEHRSSKLPWPEWMGVMHGYEIEFVFGL

SEQ ID NO: 15650 - protein, 32 aa, Artificial sequence
  synthetic peptide
FYYFEHRSSKLPWPEWMGVMHGYEIEFVFGLP

SEQ ID NO: 15651 - protein, 32 aa, Artificial sequence
  synthetic peptide
YYFEHRSSKLPWPEWMGVMHGYEIEFVFGLPL

SEQ ID NO: 15652 - protein, 32 aa, Artificial sequence
  synthetic peptide
YFEHRSSKLPWPEWMGVMHGYEIEFVFGLPLE

SEQ ID NO: 15653 - protein, 32 aa, Artificial sequence
  synthetic peptide
FEHRSSKLPWPEWMGVMHGYEIEFVFGLPLER

SEQ ID NO: 15654 - protein, 32 aa, Artificial sequence
  synthetic peptide
EHRSSKLPWPEWMGVMHGYEIEFVFGLPLERR

SEQ ID NO: 15655 - protein, 32 aa, Artificial sequence
  synthetic peptide
HRSSKLPWPEWMGVMHGYEIEFVFGLPLERRD

SEQ ID NO: 15656 - protein, 32 aa, Artificial sequence
  synthetic peptide
RSSKLPWPEWMGVMHGYEIEFVFGLPLERRDN

SEQ ID NO: 15657 - protein, 32 aa, Artificial sequence
  synthetic peptide
SSKLPWPEWMGVMHGYEIEFVFGLPLERRDNY

SEQ ID NO: 15658 - protein, 32 aa, Artificial sequence
  synthetic peptide
SKLPWPEWMGVMHGYEIEFVFGLPLERRDNYT

SEQ ID NO: 15659 - protein, 32 aa, Artificial sequence
  synthetic peptide
KLPWPEWMGVMHGYEIEFVFGLPLERRDNYTK

SEQ ID NO: 15660 - protein, 32 aa, Artificial sequence
  synthetic peptide
LPWPEWMGVMHGYEIEFVFGLPLERRDNYTKA

SEQ ID NO: 15661 - protein, 32 aa, Artificial sequence
  synthetic peptide
PWPEWMGVMHGYEIEFVFGLPLERRDNYTKAE

SEQ ID NO: 15662 - protein, 32 aa, Artificial sequence
  synthetic peptide
WPEWMGVMHGYEIEFVFGLPLERRDNYTKAEE

SEQ ID NO: 15663 - protein, 32 aa, Artificial sequence
  synthetic peptide
PEWMGVMHGYEIEFVFGLPLERRDNYTKAEEI

SEQ ID NO: 15664 - protein, 32 aa, Artificial sequence
  synthetic peptide
EWMGVMHGYEIEFVFGLPLERRDNYTKAEEIL

SEQ ID NO: 15665 - protein, 32 aa, Artificial sequence
  synthetic peptide
WMGVMHGYEIEFVFGLPLERRDNYTKAEEILS

SEQ ID NO: 15666 - protein, 32 aa, Artificial sequence
  synthetic peptide
MGVMHGYEIEFVFGLPLERRDNYTKAEEILSR

SEQ ID NO: 15667 - protein, 32 aa, Artificial sequence
  synthetic peptide
GVMHGYEIEFVFGLPLERRDNYTKAEEILSRS

SEQ ID NO: 15668 - protein, 32 aa, Artificial sequence
  synthetic peptide
VMHGYEIEFVFGLPLERRDNYTKAEEILSRSI

SEQ ID NO: 15669 - protein, 32 aa, Artificial sequence
  synthetic peptide
MHGYEIEFVFGLPLERRDNYTKAEEILSRSIV

SEQ ID NO: 15670 - protein, 32 aa, Artificial sequence
  synthetic peptide
HGYEIEFVFGLPLERRDNYTKAEEILSRSIVK

SEQ ID NO: 15671 - protein, 32 aa, Artificial sequence
  synthetic peptide
GYEIEFVFGLPLERRDNYTKAEEILSRSIVKR

SEQ ID NO: 15672 - protein, 32 aa, Artificial sequence
  synthetic peptide
YEIEFVFGLPLERRDNYTKAEEILSRSIVKRW

SEQ ID NO: 15673 - protein, 32 aa, Artificial sequence
  synthetic peptide
EIEFVFGLPLERRDNYTKAEEILSRSIVKRWA

SEQ ID NO: 15674 - protein, 32 aa, Artificial sequence
  synthetic peptide
IEFVFGLPLERRDNYTKAEEILSRSIVKRWAN

SEQ ID NO: 15675 - protein, 32 aa, Artificial sequence
  synthetic peptide
EFVFGLPLERRDNYTKAEEILSRSIVKRWANF

SEQ ID NO: 15676 - protein, 32 aa, Artificial sequence
  synthetic peptide
FVFGLPLERRDNYTKAEEILSRSIVKRWANFA

SEQ ID NO: 15677 - protein, 32 aa, Artificial sequence
  synthetic peptide
VFGLPLERRDNYTKAEEILSRSIVKRWANFAK

SEQ ID NO: 15678 - protein, 32 aa, Artificial sequence
  synthetic peptide
FGLPLERRDNYTKAEEILSRSIVKRWANFAKY

SEQ ID NO: 15679 - protein, 32 aa, Artificial sequence
  synthetic peptide
GLPLERRDNYTKAEEILSRSIVKRWANFAKYG

SEQ ID NO: 15680 - protein, 32 aa, Artificial sequence
  synthetic peptide
LPLERRDNYTKAEEILSRSIVKRWANFAKYGN

SEQ ID NO: 15681 - protein, 32 aa, Artificial sequence
  synthetic peptide
PLERRDNYTKAEEILSRSIVKRWANFAKYGNP

SEQ ID NO: 15682 - protein, 32 aa, Artificial sequence
  synthetic peptide
LERRDNYTKAEEILSRSIVKRWANFAKYGNPN

SEQ ID NO: 15683 - protein, 32 aa, Artificial sequence
  synthetic peptide
ERRDNYTKAEEILSRSIVKRWANFAKYGNPNE

SEQ ID NO: 15684 - protein, 32 aa, Artificial sequence
  synthetic peptide
RRDNYTKAEEILSRSIVKRWANFAKYGNPNET

SEQ ID NO: 15685 - protein, 32 aa, Artificial sequence
  synthetic peptide
RDNYTKAEEILSRSIVKRWANFAKYGNPNETQ

SEQ ID NO: 15686 - protein, 32 aa, Artificial sequence
  synthetic peptide
DNYTKAEEILSRSIVKRWANFAKYGNPNETQN

SEQ ID NO: 15687 - protein, 32 aa, Artificial sequence
  synthetic peptide
NYTKAEEILSRSIVKRWANFAKYGNPNETQNN

SEQ ID NO: 15688 - protein, 32 aa, Artificial sequence
  synthetic peptide
YTKAEEILSRSIVKRWANFAKYGNPNETQNNS

SEQ ID NO: 15689 - protein, 32 aa, Artificial sequence
  synthetic peptide
TKAEEILSRSIVKRWANFAKYGNPNETQNNST

SEQ ID NO: 15690 - protein, 32 aa, Artificial sequence
  synthetic peptide
KAEEILSRSIVKRWANFAKYGNPNETQNNSTS

SEQ ID NO: 15691 - protein, 32 aa, Artificial sequence
  synthetic peptide
AEEILSRSIVKRWANFAKYGNPNETQNNSTSW

SEQ ID NO: 15692 - protein, 32 aa, Artificial sequence
  synthetic peptide
EEILSRSIVKRWANFAKYGNPNETQNNSTSWP

SEQ ID NO: 15693 - protein, 32 aa, Artificial sequence
  synthetic peptide
EILSRSIVKRWANFAKYGNPNETQNNSTSWPV

SEQ ID NO: 15694 - protein, 32 aa, Artificial sequence
  synthetic peptide
ILSRSIVKRWANFAKYGNPNETQNNSTSWPVF

SEQ ID NO: 15695 - protein, 32 aa, Artificial sequence
  synthetic peptide
LSRSIVKRWANFAKYGNPNETQNNSTSWPVFK

SEQ ID NO: 15696 - protein, 32 aa, Artificial sequence
  synthetic peptide
SRSIVKRWANFAKYGNPNETQNNSTSWPVFKS

SEQ ID NO: 15697 - protein, 32 aa, Artificial sequence
  synthetic peptide
RSIVKRWANFAKYGNPNETQNNSTSWPVFKST

SEQ ID NO: 15698 - protein, 32 aa, Artificial sequence
  synthetic peptide
SIVKRWANFAKYGNPNETQNNSTSWPVFKSTE

SEQ ID NO: 15699 - protein, 32 aa, Artificial sequence
  synthetic peptide
IVKRWANFAKYGNPNETQNNSTSWPVFKSTEQ

SEQ ID NO: 15700 - protein, 32 aa, Artificial sequence
  synthetic peptide
VKRWANFAKYGNPNETQNNSTSWPVFKSTEQK

SEQ ID NO: 15701 - protein, 32 aa, Artificial sequence
  synthetic peptide
KRWANFAKYGNPNETQNNSTSWPVFKSTEQKY

SEQ ID NO: 15702 - protein, 32 aa, Artificial sequence
  synthetic peptide
RWANFAKYGNPNETQNNSTSWPVFKSTEQKYL

SEQ ID NO: 15703 - protein, 32 aa, Artificial sequence
  synthetic peptide
WANFAKYGNPNETQNNSTSWPVFKSTEQKYLT

SEQ ID NO: 15704 - protein, 32 aa, Artificial sequence
  synthetic peptide
ANFAKYGNPNETQNNSTSWPVFKSTEQKYLTL

SEQ ID NO: 15705 - protein, 32 aa, Artificial sequence
  synthetic peptide
NFAKYGNPNETQNNSTSWPVFKSTEQKYLTLN

SEQ ID NO: 15706 - protein, 32 aa, Artificial sequence
  synthetic peptide
FAKYGNPNETQNNSTSWPVFKSTEQKYLTLNT

SEQ ID NO: 15707 - protein, 32 aa, Artificial sequence
  synthetic peptide
AKYGNPNETQNNSTSWPVFKSTEQKYLTLNTE

SEQ ID NO: 15708 - protein, 32 aa, Artificial sequence
  synthetic peptide
KYGNPNETQNNSTSWPVFKSTEQKYLTLNTES

SEQ ID NO: 15709 - protein, 32 aa, Artificial sequence
  synthetic peptide
YGNPNETQNNSTSWPVFKSTEQKYLTLNTEST

SEQ ID NO: 15710 - protein, 32 aa, Artificial sequence
  synthetic peptide
GNPNETQNNSTSWPVFKSTEQKYLTLNTESTR

SEQ ID NO: 15711 - protein, 32 aa, Artificial sequence
  synthetic peptide
NPNETQNNSTSWPVFKSTEQKYLTLNTESTRI

SEQ ID NO: 15712 - protein, 32 aa, Artificial sequence
  synthetic peptide
PNETQNNSTSWPVFKSTEQKYLTLNTESTRIM

SEQ ID NO: 15713 - protein, 32 aa, Artificial sequence
  synthetic peptide
NETQNNSTSWPVFKSTEQKYLTLNTESTRIMT

SEQ ID NO: 15714 - protein, 32 aa, Artificial sequence
  synthetic peptide
ETQNNSTSWPVFKSTEQKYLTLNTESTRIMTK

SEQ ID NO: 15715 - protein, 32 aa, Artificial sequence
  synthetic peptide
TQNNSTSWPVFKSTEQKYLTLNTESTRIMTKL

SEQ ID NO: 15716 - protein, 32 aa, Artificial sequence
  synthetic peptide
QNNSTSWPVFKSTEQKYLTLNTESTRIMTKLR

SEQ ID NO: 15717 - protein, 32 aa, Artificial sequence
  synthetic peptide
NNSTSWPVFKSTEQKYLTLNTESTRIMTKLRA

SEQ ID NO: 15718 - protein, 32 aa, Artificial sequence
  synthetic peptide
NSTSWPVFKSTEQKYLTLNTESTRIMTKLRAQ

SEQ ID NO: 15719 - protein, 32 aa, Artificial sequence
  synthetic peptide
STSWPVFKSTEQKYLTLNTESTRIMTKLRAQQ

SEQ ID NO: 15720 - protein, 32 aa, Artificial sequence
  synthetic peptide
TSWPVFKSTEQKYLTLNTESTRIMTKLRAQQC

SEQ ID NO: 15721 - protein, 32 aa, Artificial sequence
  synthetic peptide
SWPVFKSTEQKYLTLNTESTRIMTKLRAQQCR

SEQ ID NO: 15722 - protein, 32 aa, Artificial sequence
  synthetic peptide
WPVFKSTEQKYLTLNTESTRIMTKLRAQQCRF

SEQ ID NO: 15723 - protein, 32 aa, Artificial sequence
  synthetic peptide
PVFKSTEQKYLTLNTESTRIMTKLRAQQCRFW

SEQ ID NO: 15724 - protein, 32 aa, Artificial sequence
  synthetic peptide
VFKSTEQKYLTLNTESTRIMTKLRAQQCRFWT

SEQ ID NO: 15725 - protein, 32 aa, Artificial sequence
  synthetic peptide
FKSTEQKYLTLNTESTRIMTKLRAQQCRFWTS

SEQ ID NO: 15726 - protein, 32 aa, Artificial sequence
  synthetic peptide
KSTEQKYLTLNTESTRIMTKLRAQQCRFWTSF

SEQ ID NO: 15727 - protein, 32 aa, Artificial sequence
  synthetic peptide
STEQKYLTLNTESTRIMTKLRAQQCRFWTSFF

SEQ ID NO: 15728 - protein, 32 aa, Artificial sequence
  synthetic peptide
TEQKYLTLNTESTRIMTKLRAQQCRFWTSFFP

SEQ ID NO: 15729 - protein, 32 aa, Artificial sequence
  synthetic peptide
EQKYLTLNTESTRIMTKLRAQQCRFWTSFFPK

SEQ ID NO: 15730 - protein, 32 aa, Artificial sequence
  synthetic peptide
QKYLTLNTESTRIMTKLRAQQCRFWTSFFPKV

SEQ ID NO: 15731 - protein, 32 aa, Artificial sequence
  synthetic peptide
KYLTLNTESTRIMTKLRAQQCRFWTSFFPKVL

SEQ ID NO: 15732 - protein, 32 aa, Artificial sequence
  synthetic peptide
YLTLNTESTRIMTKLRAQQCRFWTSFFPKVLE

SEQ ID NO: 15733 - protein, 32 aa, Artificial sequence
  synthetic peptide
LTLNTESTRIMTKLRAQQCRFWTSFFPKVLEM

SEQ ID NO: 15734 - protein, 32 aa, Artificial sequence
  synthetic peptide
TLNTESTRIMTKLRAQQCRFWTSFFPKVLEMT

SEQ ID NO: 15735 - protein, 32 aa, Artificial sequence
  synthetic peptide
LNTESTRIMTKLRAQQCRFWTSFFPKVLEMTG

SEQ ID NO: 15736 - protein, 32 aa, Artificial sequence
  synthetic peptide
NTESTRIMTKLRAQQCRFWTSFFPKVLEMTGN

SEQ ID NO: 15737 - protein, 32 aa, Artificial sequence
  synthetic peptide
TESTRIMTKLRAQQCRFWTSFFPKVLEMTGNI

SEQ ID NO: 15738 - protein, 32 aa, Artificial sequence
  synthetic peptide
ESTRIMTKLRAQQCRFWTSFFPKVLEMTGNID

SEQ ID NO: 15739 - protein, 32 aa, Artificial sequence
  synthetic peptide
STRIMTKLRAQQCRFWTSFFPKVLEMTGNIDE

SEQ ID NO: 15740 - protein, 32 aa, Artificial sequence
  synthetic peptide
TRIMTKLRAQQCRFWTSFFPKVLEMTGNIDEA

SEQ ID NO: 15741 - protein, 32 aa, Artificial sequence
  synthetic peptide
RIMTKLRAQQCRFWTSFFPKVLEMTGNIDEAE

SEQ ID NO: 15742 - protein, 32 aa, Artificial sequence
  synthetic peptide
IMTKLRAQQCRFWTSFFPKVLEMTGNIDEAEW

SEQ ID NO: 15743 - protein, 32 aa, Artificial sequence
  synthetic peptide
MTKLRAQQCRFWTSFFPKVLEMTGNIDEAEWE

SEQ ID NO: 15744 - protein, 32 aa, Artificial sequence
  synthetic peptide
TKLRAQQCRFWTSFFPKVLEMTGNIDEAEWEW

SEQ ID NO: 15745 - protein, 32 aa, Artificial sequence
  synthetic peptide
KLRAQQCRFWTSFFPKVLEMTGNIDEAEWEWK

SEQ ID NO: 15746 - protein, 32 aa, Artificial sequence
  synthetic peptide
LRAQQCRFWTSFFPKVLEMTGNIDEAEWEWKA

SEQ ID NO: 15747 - protein, 32 aa, Artificial sequence
  synthetic peptide
RAQQCRFWTSFFPKVLEMTGNIDEAEWEWKAG

SEQ ID NO: 15748 - protein, 32 aa, Artificial sequence
  synthetic peptide
AQQCRFWTSFFPKVLEMTGNIDEAEWEWKAGF

SEQ ID NO: 15749 - protein, 32 aa, Artificial sequence
  synthetic peptide
QQCRFWTSFFPKVLEMTGNIDEAEWEWKAGFH

SEQ ID NO: 15750 - protein, 32 aa, Artificial sequence
  synthetic peptide
QCRFWTSFFPKVLEMTGNIDEAEWEWKAGFHR

SEQ ID NO: 15751 - protein, 32 aa, Artificial sequence
  synthetic peptide
CRFWTSFFPKVLEMTGNIDEAEWEWKAGFHRW

SEQ ID NO: 15752 - protein, 32 aa, Artificial sequence
  synthetic peptide
RFWTSFFPKVLEMTGNIDEAEWEWKAGFHRWN

SEQ ID NO: 15753 - protein, 32 aa, Artificial sequence
  synthetic peptide
FWTSFFPKVLEMTGNIDEAEWEWKAGFHRWNN

SEQ ID NO: 15754 - protein, 32 aa, Artificial sequence
  synthetic peptide
WTSFFPKVLEMTGNIDEAEWEWKAGFHRWNNY

SEQ ID NO: 15755 - protein, 32 aa, Artificial sequence
  synthetic peptide
TSFFPKVLEMTGNIDEAEWEWKAGFHRWNNYM

SEQ ID NO: 15756 - protein, 32 aa, Artificial sequence
  synthetic peptide
SFFPKVLEMTGNIDEAEWEWKAGFHRWNNYMM

SEQ ID NO: 15757 - protein, 32 aa, Artificial sequence
  synthetic peptide
FFPKVLEMTGNIDEAEWEWKAGFHRWNNYMMD

SEQ ID NO: 15758 - protein, 32 aa, Artificial sequence
  synthetic peptide
FPKVLEMTGNIDEAEWEWKAGFHRWNNYMMDW

SEQ ID NO: 15759 - protein, 32 aa, Artificial sequence
  synthetic peptide
PKVLEMTGNIDEAEWEWKAGFHRWNNYMMDWK

SEQ ID NO: 15760 - protein, 32 aa, Artificial sequence
  synthetic peptide
KVLEMTGNIDEAEWEWKAGFHRWNNYMMDWKN

SEQ ID NO: 15761 - protein, 32 aa, Artificial sequence
  synthetic peptide
VLEMTGNIDEAEWEWKAGFHRWNNYMMDWKNQ

SEQ ID NO: 15762 - protein, 32 aa, Artificial sequence
  synthetic peptide
LEMTGNIDEAEWEWKAGFHRWNNYMMDWKNQF

SEQ ID NO: 15763 - protein, 32 aa, Artificial sequence
  synthetic peptide
EMTGNIDEAEWEWKAGFHRWNNYMMDWKNQFN

SEQ ID NO: 15764 - protein, 32 aa, Artificial sequence
  synthetic peptide
MTGNIDEAEWEWKAGFHRWNNYMMDWKNQFND

SEQ ID NO: 15765 - protein, 32 aa, Artificial sequence
  synthetic peptide
TGNIDEAEWEWKAGFHRWNNYMMDWKNQFNDY

SEQ ID NO: 15766 - protein, 32 aa, Artificial sequence
  synthetic peptide
GNIDEAEWEWKAGFHRWNNYMMDWKNQFNDYT

SEQ ID NO: 15767 - protein, 32 aa, Artificial sequence
  synthetic peptide
NIDEAEWEWKAGFHRWNNYMMDWKNQFNDYTS

SEQ ID NO: 15768 - protein, 32 aa, Artificial sequence
  synthetic peptide
IDEAEWEWKAGFHRWNNYMMDWKNQFNDYTSK

SEQ ID NO: 15769 - protein, 32 aa, Artificial sequence
  synthetic peptide
DEAEWEWKAGFHRWNNYMMDWKNQFNDYTSKK

SEQ ID NO: 15770 - protein, 32 aa, Artificial sequence
  synthetic peptide
EAEWEWKAGFHRWNNYMMDWKNQFNDYTSKKE

SEQ ID NO: 15771 - protein, 32 aa, Artificial sequence
  synthetic peptide
AEWEWKAGFHRWNNYMMDWKNQFNDYTSKKES

SEQ ID NO: 15772 - protein, 32 aa, Artificial sequence
  synthetic peptide
EWEWKAGFHRWNNYMMDWKNQFNDYTSKKESC

SEQ ID NO: 15773 - protein, 32 aa, Artificial sequence
  synthetic peptide
WEWKAGFHRWNNYMMDWKNQFNDYTSKKESCV

SEQ ID NO: 15774 - protein, 32 aa, Artificial sequence
  synthetic peptide
EWKAGFHRWNNYMMDWKNQFNDYTSKKESCVG

SEQ ID NO: 15775 - protein, 32 aa, Artificial sequence
  synthetic peptide
WKAGFHRWNNYMMDWKNQFNDYTSKKESCVGL

SEQ ID NO: 15776 - protein, 33 aa, Artificial sequence
  synthetic peptide
MHSKVTIICIRFLFWFLLLCMLIGKSHTEDDII

SEQ ID NO: 15777 - protein, 33 aa, Artificial sequence
  synthetic peptide
HSKVTIICIRFLFWFLLLCMLIGKSHTEDDIII

SEQ ID NO: 15778 - protein, 33 aa, Artificial sequence
  synthetic peptide
SKVTIICIRFLFWFLLLCMLIGKSHTEDDIIIA

SEQ ID NO: 15779 - protein, 33 aa, Artificial sequence
  synthetic peptide
KVTIICIRFLFWFLLLCMLIGKSHTEDDIIIAT

SEQ ID NO: 15780 - protein, 33 aa, Artificial sequence
  synthetic peptide
VTIICIRFLFWFLLLCMLIGKSHTEDDIIIATK

SEQ ID NO: 15781 - protein, 33 aa, Artificial sequence
  synthetic peptide
TIICIRFLFWFLLLCMLIGKSHTEDDIIIATKN

SEQ ID NO: 15782 - protein, 33 aa, Artificial sequence
  synthetic peptide
IICIRFLFWFLLLCMLIGKSHTEDDIIIATKNG

SEQ ID NO: 15783 - protein, 33 aa, Artificial sequence
  synthetic peptide
ICIRFLFWFLLLCMLIGKSHTEDDIIIATKNGK

SEQ ID NO: 15784 - protein, 33 aa, Artificial sequence
  synthetic peptide
CIRFLFWFLLLCMLIGKSHTEDDIIIATKNGKV

SEQ ID NO: 15785 - protein, 33 aa, Artificial sequence
  synthetic peptide
IRFLFWFLLLCMLIGKSHTEDDIIIATKNGKVR

SEQ ID NO: 15786 - protein, 33 aa, Artificial sequence
  synthetic peptide
RFLFWFLLLCMLIGKSHTEDDIIIATKNGKVRG

SEQ ID NO: 15787 - protein, 33 aa, Artificial sequence
  synthetic peptide
FLFWFLLLCMLIGKSHTEDDIIIATKNGKVRGM

SEQ ID NO: 15788 - protein, 33 aa, Artificial sequence
  synthetic peptide
LFWFLLLCMLIGKSHTEDDIIIATKNGKVRGMN

SEQ ID NO: 15789 - protein, 33 aa, Artificial sequence
  synthetic peptide
FWFLLLCMLIGKSHTEDDIIIATKNGKVRGMNL

SEQ ID NO: 15790 - protein, 33 aa, Artificial sequence
  synthetic peptide
WFLLLCMLIGKSHTEDDIIIATKNGKVRGMNLT

SEQ ID NO: 15791 - protein, 33 aa, Artificial sequence
  synthetic peptide
FLLLCMLIGKSHTEDDIIIATKNGKVRGMNLTV

SEQ ID NO: 15792 - protein, 33 aa, Artificial sequence
  synthetic peptide
LLLCMLIGKSHTEDDIIIATKNGKVRGMNLTVF

SEQ ID NO: 15793 - protein, 33 aa, Artificial sequence
  synthetic peptide
LLCMLIGKSHTEDDIIIATKNGKVRGMNLTVFG

SEQ ID NO: 15794 - protein, 33 aa, Artificial sequence
  synthetic peptide
LCMLIGKSHTEDDIIIATKNGKVRGMNLTVFGG

SEQ ID NO: 15795 - protein, 33 aa, Artificial sequence
  synthetic peptide
CMLIGKSHTEDDIIIATKNGKVRGMNLTVFGGT

SEQ ID NO: 15796 - protein, 33 aa, Artificial sequence
  synthetic peptide
MLIGKSHTEDDIIIATKNGKVRGMNLTVFGGTV

SEQ ID NO: 15797 - protein, 33 aa, Artificial sequence
  synthetic peptide
LIGKSHTEDDIIIATKNGKVRGMNLTVFGGTVT

SEQ ID NO: 15798 - protein, 33 aa, Artificial sequence
  synthetic peptide
IGKSHTEDDIIIATKNGKVRGMNLTVFGGTVTA

SEQ ID NO: 15799 - protein, 33 aa, Artificial sequence
  synthetic peptide
GKSHTEDDIIIATKNGKVRGMNLTVFGGTVTAF

SEQ ID NO: 15800 - protein, 33 aa, Artificial sequence
  synthetic peptide
KSHTEDDIIIATKNGKVRGMNLTVFGGTVTAFL

SEQ ID NO: 15801 - protein, 33 aa, Artificial sequence
  synthetic peptide
SHTEDDIIIATKNGKVRGMNLTVFGGTVTAFLG

SEQ ID NO: 15802 - protein, 33 aa, Artificial sequence
  synthetic peptide
HTEDDIIIATKNGKVRGMNLTVFGGTVTAFLGI

SEQ ID NO: 15803 - protein, 33 aa, Artificial sequence
  synthetic peptide
TEDDIIIATKNGKVRGMNLTVFGGTVTAFLGIP

SEQ ID NO: 15804 - protein, 33 aa, Artificial sequence
  synthetic peptide
EDDIIIATKNGKVRGMNLTVFGGTVTAFLGIPY

SEQ ID NO: 15805 - protein, 33 aa, Artificial sequence
  synthetic peptide
DDIIIATKNGKVRGMNLTVFGGTVTAFLGIPYA

SEQ ID NO: 15806 - protein, 33 aa, Artificial sequence
  synthetic peptide
DIIIATKNGKVRGMNLTVFGGTVTAFLGIPYAQ

SEQ ID NO: 15807 - protein, 33 aa, Artificial sequence
  synthetic peptide
IIIATKNGKVRGMNLTVFGGTVTAFLGIPYAQP

SEQ ID NO: 15808 - protein, 33 aa, Artificial sequence
  synthetic peptide
IIATKNGKVRGMNLTVFGGTVTAFLGIPYAQPP

SEQ ID NO: 15809 - protein, 33 aa, Artificial sequence
  synthetic peptide
IATKNGKVRGMNLTVFGGTVTAFLGIPYAQPPL

SEQ ID NO: 15810 - protein, 33 aa, Artificial sequence
  synthetic peptide
ATKNGKVRGMNLTVFGGTVTAFLGIPYAQPPLG

SEQ ID NO: 15811 - protein, 33 aa, Artificial sequence
  synthetic peptide
TKNGKVRGMNLTVFGGTVTAFLGIPYAQPPLGR

SEQ ID NO: 15812 - protein, 33 aa, Artificial sequence
  synthetic peptide
KNGKVRGMNLTVFGGTVTAFLGIPYAQPPLGRL

SEQ ID NO: 15813 - protein, 33 aa, Artificial sequence
  synthetic peptide
NGKVRGMNLTVFGGTVTAFLGIPYAQPPLGRLR

SEQ ID NO: 15814 - protein, 33 aa, Artificial sequence
  synthetic peptide
GKVRGMNLTVFGGTVTAFLGIPYAQPPLGRLRF

SEQ ID NO: 15815 - protein, 33 aa, Artificial sequence
  synthetic peptide
KVRGMNLTVFGGTVTAFLGIPYAQPPLGRLRFK

SEQ ID NO: 15816 - protein, 33 aa, Artificial sequence
  synthetic peptide
VRGMNLTVFGGTVTAFLGIPYAQPPLGRLRFKK

SEQ ID NO: 15817 - protein, 33 aa, Artificial sequence
  synthetic peptide
RGMNLTVFGGTVTAFLGIPYAQPPLGRLRFKKP

SEQ ID NO: 15818 - protein, 33 aa, Artificial sequence
  synthetic peptide
GMNLTVFGGTVTAFLGIPYAQPPLGRLRFKKPQ

SEQ ID NO: 15819 - protein, 33 aa, Artificial sequence
  synthetic peptide
MNLTVFGGTVTAFLGIPYAQPPLGRLRFKKPQS

SEQ ID NO: 15820 - protein, 33 aa, Artificial sequence
  synthetic peptide
NLTVFGGTVTAFLGIPYAQPPLGRLRFKKPQSL

SEQ ID NO: 15821 - protein, 33 aa, Artificial sequence
  synthetic peptide
LTVFGGTVTAFLGIPYAQPPLGRLRFKKPQSLT

SEQ ID NO: 15822 - protein, 33 aa, Artificial sequence
  synthetic peptide
TVFGGTVTAFLGIPYAQPPLGRLRFKKPQSLTK

SEQ ID NO: 15823 - protein, 33 aa, Artificial sequence
  synthetic peptide
VFGGTVTAFLGIPYAQPPLGRLRFKKPQSLTKW

SEQ ID NO: 15824 - protein, 33 aa, Artificial sequence
  synthetic peptide
FGGTVTAFLGIPYAQPPLGRLRFKKPQSLTKWS

SEQ ID NO: 15825 - protein, 33 aa, Artificial sequence
  synthetic peptide
GGTVTAFLGIPYAQPPLGRLRFKKPQSLTKWSD

SEQ ID NO: 15826 - protein, 33 aa, Artificial sequence
  synthetic peptide
GTVTAFLGIPYAQPPLGRLRFKKPQSLTKWSDI

SEQ ID NO: 15827 - protein, 33 aa, Artificial sequence
  synthetic peptide
TVTAFLGIPYAQPPLGRLRFKKPQSLTKWSDIW

SEQ ID NO: 15828 - protein, 33 aa, Artificial sequence
  synthetic peptide
VTAFLGIPYAQPPLGRLRFKKPQSLTKWSDIWN

SEQ ID NO: 15829 - protein, 33 aa, Artificial sequence
  synthetic peptide
TAFLGIPYAQPPLGRLRFKKPQSLTKWSDIWNA

SEQ ID NO: 15830 - protein, 33 aa, Artificial sequence
  synthetic peptide
AFLGIPYAQPPLGRLRFKKPQSLTKWSDIWNAT

SEQ ID NO: 15831 - protein, 33 aa, Artificial sequence
  synthetic peptide
FLGIPYAQPPLGRLRFKKPQSLTKWSDIWNATK

SEQ ID NO: 15832 - protein, 33 aa, Artificial sequence
  synthetic peptide
LGIPYAQPPLGRLRFKKPQSLTKWSDIWNATKY

SEQ ID NO: 15833 - protein, 33 aa, Artificial sequence
  synthetic peptide
GIPYAQPPLGRLRFKKPQSLTKWSDIWNATKYA

SEQ ID NO: 15834 - protein, 33 aa, Artificial sequence
  synthetic peptide
IPYAQPPLGRLRFKKPQSLTKWSDIWNATKYAN

SEQ ID NO: 15835 - protein, 33 aa, Artificial sequence
  synthetic peptide
PYAQPPLGRLRFKKPQSLTKWSDIWNATKYANS

SEQ ID NO: 15836 - protein, 33 aa, Artificial sequence
  synthetic peptide
YAQPPLGRLRFKKPQSLTKWSDIWNATKYANSC

SEQ ID NO: 15837 - protein, 33 aa, Artificial sequence
  synthetic peptide
AQPPLGRLRFKKPQSLTKWSDIWNATKYANSCC

SEQ ID NO: 15838 - protein, 33 aa, Artificial sequence
  synthetic peptide
QPPLGRLRFKKPQSLTKWSDIWNATKYANSCCQ

SEQ ID NO: 15839 - protein, 33 aa, Artificial sequence
  synthetic peptide
PPLGRLRFKKPQSLTKWSDIWNATKYANSCCQN

SEQ ID NO: 15840 - protein, 33 aa, Artificial sequence
  synthetic peptide
PLGRLRFKKPQSLTKWSDIWNATKYANSCCQNI

SEQ ID NO: 15841 - protein, 33 aa, Artificial sequence
  synthetic peptide
LGRLRFKKPQSLTKWSDIWNATKYANSCCQNID

SEQ ID NO: 15842 - protein, 33 aa, Artificial sequence
  synthetic peptide
GRLRFKKPQSLTKWSDIWNATKYANSCCQNIDQ

SEQ ID NO: 15843 - protein, 33 aa, Artificial sequence
  synthetic peptide
RLRFKKPQSLTKWSDIWNATKYANSCCQNIDQS

SEQ ID NO: 15844 - protein, 33 aa, Artificial sequence
  synthetic peptide
LRFKKPQSLTKWSDIWNATKYANSCCQNIDQSF

SEQ ID NO: 15845 - protein, 33 aa, Artificial sequence
  synthetic peptide
RFKKPQSLTKWSDIWNATKYANSCCQNIDQSFP

SEQ ID NO: 15846 - protein, 33 aa, Artificial sequence
  synthetic peptide
FKKPQSLTKWSDIWNATKYANSCCQNIDQSFPG

SEQ ID NO: 15847 - protein, 33 aa, Artificial sequence
  synthetic peptide
KKPQSLTKWSDIWNATKYANSCCQNIDQSFPGF

SEQ ID NO: 15848 - protein, 33 aa, Artificial sequence
  synthetic peptide
KPQSLTKWSDIWNATKYANSCCQNIDQSFPGFH

SEQ ID NO: 15849 - protein, 33 aa, Artificial sequence
  synthetic peptide
PQSLTKWSDIWNATKYANSCCQNIDQSFPGFHG

SEQ ID NO: 15850 - protein, 33 aa, Artificial sequence
  synthetic peptide
QSLTKWSDIWNATKYANSCCQNIDQSFPGFHGS

SEQ ID NO: 15851 - protein, 33 aa, Artificial sequence
  synthetic peptide
SLTKWSDIWNATKYANSCCQNIDQSFPGFHGSE

SEQ ID NO: 15852 - protein, 33 aa, Artificial sequence
  synthetic peptide
LTKWSDIWNATKYANSCCQNIDQSFPGFHGSEM

SEQ ID NO: 15853 - protein, 33 aa, Artificial sequence
  synthetic peptide
TKWSDIWNATKYANSCCQNIDQSFPGFHGSEMW

SEQ ID NO: 15854 - protein, 33 aa, Artificial sequence
  synthetic peptide
KWSDIWNATKYANSCCQNIDQSFPGFHGSEMWN

SEQ ID NO: 15855 - protein, 33 aa, Artificial sequence
  synthetic peptide
WSDIWNATKYANSCCQNIDQSFPGFHGSEMWNP

SEQ ID NO: 15856 - protein, 33 aa, Artificial sequence
  synthetic peptide
SDIWNATKYANSCCQNIDQSFPGFHGSEMWNPN

SEQ ID NO: 15857 - protein, 33 aa, Artificial sequence
  synthetic peptide
DIWNATKYANSCCQNIDQSFPGFHGSEMWNPNT

SEQ ID NO: 15858 - protein, 33 aa, Artificial sequence
  synthetic peptide
IWNATKYANSCCQNIDQSFPGFHGSEMWNPNTD

SEQ ID NO: 15859 - protein, 33 aa, Artificial sequence
  synthetic peptide
WNATKYANSCCQNIDQSFPGFHGSEMWNPNTDL

SEQ ID NO: 15860 - protein, 33 aa, Artificial sequence
  synthetic peptide
NATKYANSCCQNIDQSFPGFHGSEMWNPNTDLS

SEQ ID NO: 15861 - protein, 33 aa, Artificial sequence
  synthetic peptide
ATKYANSCCQNIDQSFPGFHGSEMWNPNTDLSE

SEQ ID NO: 15862 - protein, 33 aa, Artificial sequence
  synthetic peptide
TKYANSCCQNIDQSFPGFHGSEMWNPNTDLSED

SEQ ID NO: 15863 - protein, 33 aa, Artificial sequence
  synthetic peptide
KYANSCCQNIDQSFPGFHGSEMWNPNTDLSEDC

SEQ ID NO: 15864 - protein, 33 aa, Artificial sequence
  synthetic peptide
YANSCCQNIDQSFPGFHGSEMWNPNTDLSEDCL

SEQ ID NO: 15865 - protein, 33 aa, Artificial sequence
  synthetic peptide
ANSCCQNIDQSFPGFHGSEMWNPNTDLSEDCLY

SEQ ID NO: 15866 - protein, 33 aa, Artificial sequence
  synthetic peptide
NSCCQNIDQSFPGFHGSEMWNPNTDLSEDCLYL

SEQ ID NO: 15867 - protein, 33 aa, Artificial sequence
  synthetic peptide
SCCQNIDQSFPGFHGSEMWNPNTDLSEDCLYLN

SEQ ID NO: 15868 - protein, 33 aa, Artificial sequence
  synthetic peptide
CCQNIDQSFPGFHGSEMWNPNTDLSEDCLYLNV

SEQ ID NO: 15869 - protein, 33 aa, Artificial sequence
  synthetic peptide
CQNIDQSFPGFHGSEMWNPNTDLSEDCLYLNVW

SEQ ID NO: 15870 - protein, 33 aa, Artificial sequence
  synthetic peptide
QNIDQSFPGFHGSEMWNPNTDLSEDCLYLNVWI

SEQ ID NO: 15871 - protein, 33 aa, Artificial sequence
  synthetic peptide
NIDQSFPGFHGSEMWNPNTDLSEDCLYLNVWIP

SEQ ID NO: 15872 - protein, 33 aa, Artificial sequence
  synthetic peptide
IDQSFPGFHGSEMWNPNTDLSEDCLYLNVWIPA

SEQ ID NO: 15873 - protein, 33 aa, Artificial sequence
  synthetic peptide
DQSFPGFHGSEMWNPNTDLSEDCLYLNVWIPAP

SEQ ID NO: 15874 - protein, 33 aa, Artificial sequence
  synthetic peptide
QSFPGFHGSEMWNPNTDLSEDCLYLNVWIPAPK

SEQ ID NO: 15875 - protein, 33 aa, Artificial sequence
  synthetic peptide
SFPGFHGSEMWNPNTDLSEDCLYLNVWIPAPKP

SEQ ID NO: 15876 - protein, 33 aa, Artificial sequence
  synthetic peptide
FPGFHGSEMWNPNTDLSEDCLYLNVWIPAPKPK

SEQ ID NO: 15877 - protein, 33 aa, Artificial sequence
  synthetic peptide
PGFHGSEMWNPNTDLSEDCLYLNVWIPAPKPKN

SEQ ID NO: 15878 - protein, 33 aa, Artificial sequence
  synthetic peptide
GFHGSEMWNPNTDLSEDCLYLNVWIPAPKPKNA

SEQ ID NO: 15879 - protein, 33 aa, Artificial sequence
  synthetic peptide
FHGSEMWNPNTDLSEDCLYLNVWIPAPKPKNAT

SEQ ID NO: 15880 - protein, 33 aa, Artificial sequence
  synthetic peptide
HGSEMWNPNTDLSEDCLYLNVWIPAPKPKNATV

SEQ ID NO: 15881 - protein, 33 aa, Artificial sequence
  synthetic peptide
GSEMWNPNTDLSEDCLYLNVWIPAPKPKNATVL

SEQ ID NO: 15882 - protein, 33 aa, Artificial sequence
  synthetic peptide
SEMWNPNTDLSEDCLYLNVWIPAPKPKNATVLI

SEQ ID NO: 15883 - protein, 33 aa, Artificial sequence
  synthetic peptide
EMWNPNTDLSEDCLYLNVWIPAPKPKNATVLIW

SEQ ID NO: 15884 - protein, 33 aa, Artificial sequence
  synthetic peptide
MWNPNTDLSEDCLYLNVWIPAPKPKNATVLIWI

SEQ ID NO: 15885 - protein, 33 aa, Artificial sequence
  synthetic peptide
WNPNTDLSEDCLYLNVWIPAPKPKNATVLIWIY

SEQ ID NO: 15886 - protein, 33 aa, Artificial sequence
  synthetic peptide
NPNTDLSEDCLYLNVWIPAPKPKNATVLIWIYG

SEQ ID NO: 15887 - protein, 33 aa, Artificial sequence
  synthetic peptide
PNTDLSEDCLYLNVWIPAPKPKNATVLIWIYGG

SEQ ID NO: 15888 - protein, 33 aa, Artificial sequence
  synthetic peptide
NTDLSEDCLYLNVWIPAPKPKNATVLIWIYGGG

SEQ ID NO: 15889 - protein, 33 aa, Artificial sequence
  synthetic peptide
TDLSEDCLYLNVWIPAPKPKNATVLIWIYGGGF

SEQ ID NO: 15890 - protein, 33 aa, Artificial sequence
  synthetic peptide
DLSEDCLYLNVWIPAPKPKNATVLIWIYGGGFQ

SEQ ID NO: 15891 - protein, 33 aa, Artificial sequence
  synthetic peptide
LSEDCLYLNVWIPAPKPKNATVLIWIYGGGFQT

SEQ ID NO: 15892 - protein, 33 aa, Artificial sequence
  synthetic peptide
SEDCLYLNVWIPAPKPKNATVLIWIYGGGFQTG

SEQ ID NO: 15893 - protein, 33 aa, Artificial sequence
  synthetic peptide
EDCLYLNVWIPAPKPKNATVLIWIYGGGFQTGT

SEQ ID NO: 15894 - protein, 33 aa, Artificial sequence
  synthetic peptide
DCLYLNVWIPAPKPKNATVLIWIYGGGFQTGTS

SEQ ID NO: 15895 - protein, 33 aa, Artificial sequence
  synthetic peptide
CLYLNVWIPAPKPKNATVLIWIYGGGFQTGTSS

SEQ ID NO: 15896 - protein, 33 aa, Artificial sequence
  synthetic peptide
LYLNVWIPAPKPKNATVLIWIYGGGFQTGTSSL

SEQ ID NO: 15897 - protein, 33 aa, Artificial sequence
  synthetic peptide
YLNVWIPAPKPKNATVLIWIYGGGFQTGTSSLH

SEQ ID NO: 15898 - protein, 33 aa, Artificial sequence
  synthetic peptide
LNVWIPAPKPKNATVLIWIYGGGFQTGTSSLHV

SEQ ID NO: 15899 - protein, 33 aa, Artificial sequence
  synthetic peptide
NVWIPAPKPKNATVLIWIYGGGFQTGTSSLHVY

SEQ ID NO: 15900 - protein, 33 aa, Artificial sequence
  synthetic peptide
VWIPAPKPKNATVLIWIYGGGFQTGTSSLHVYD

SEQ ID NO: 15901 - protein, 33 aa, Artificial sequence
  synthetic peptide
WIPAPKPKNATVLIWIYGGGFQTGTSSLHVYDG

SEQ ID NO: 15902 - protein, 33 aa, Artificial sequence
  synthetic peptide
IPAPKPKNATVLIWIYGGGFQTGTSSLHVYDGK

SEQ ID NO: 15903 - protein, 33 aa, Artificial sequence
  synthetic peptide
PAPKPKNATVLIWIYGGGFQTGTSSLHVYDGKF

SEQ ID NO: 15904 - protein, 33 aa, Artificial sequence
  synthetic peptide
APKPKNATVLIWIYGGGFQTGTSSLHVYDGKFL

SEQ ID NO: 15905 - protein, 33 aa, Artificial sequence
  synthetic peptide
PKPKNATVLIWIYGGGFQTGTSSLHVYDGKFLA

SEQ ID NO: 15906 - protein, 33 aa, Artificial sequence
  synthetic peptide
KPKNATVLIWIYGGGFQTGTSSLHVYDGKFLAR

SEQ ID NO: 15907 - protein, 33 aa, Artificial sequence
  synthetic peptide
PKNATVLIWIYGGGFQTGTSSLHVYDGKFLARV

SEQ ID NO: 15908 - protein, 33 aa, Artificial sequence
  synthetic peptide
KNATVLIWIYGGGFQTGTSSLHVYDGKFLARVE

SEQ ID NO: 15909 - protein, 33 aa, Artificial sequence
  synthetic peptide
NATVLIWIYGGGFQTGTSSLHVYDGKFLARVER

SEQ ID NO: 15910 - protein, 33 aa, Artificial sequence
  synthetic peptide
ATVLIWIYGGGFQTGTSSLHVYDGKFLARVERV

SEQ ID NO: 15911 - protein, 33 aa, Artificial sequence
  synthetic peptide
TVLIWIYGGGFQTGTSSLHVYDGKFLARVERVI

SEQ ID NO: 15912 - protein, 33 aa, Artificial sequence
  synthetic peptide
VLIWIYGGGFQTGTSSLHVYDGKFLARVERVIV

SEQ ID NO: 15913 - protein, 33 aa, Artificial sequence
  synthetic peptide
LIWIYGGGFQTGTSSLHVYDGKFLARVERVIVV

SEQ ID NO: 15914 - protein, 33 aa, Artificial sequence
  synthetic peptide
IWIYGGGFQTGTSSLHVYDGKFLARVERVIVVS

SEQ ID NO: 15915 - protein, 33 aa, Artificial sequence
  synthetic peptide
WIYGGGFQTGTSSLHVYDGKFLARVERVIVVSM

SEQ ID NO: 15916 - protein, 33 aa, Artificial sequence
  synthetic peptide
IYGGGFQTGTSSLHVYDGKFLARVERVIVVSMN

SEQ ID NO: 15917 - protein, 33 aa, Artificial sequence
  synthetic peptide
YGGGFQTGTSSLHVYDGKFLARVERVIVVSMNY

SEQ ID NO: 15918 - protein, 33 aa, Artificial sequence
  synthetic peptide
GGGFQTGTSSLHVYDGKFLARVERVIVVSMNYR

SEQ ID NO: 15919 - protein, 33 aa, Artificial sequence
  synthetic peptide
GGFQTGTSSLHVYDGKFLARVERVIVVSMNYRV

SEQ ID NO: 15920 - protein, 33 aa, Artificial sequence
  synthetic peptide
GFQTGTSSLHVYDGKFLARVERVIVVSMNYRVG

SEQ ID NO: 15921 - protein, 33 aa, Artificial sequence
  synthetic peptide
FQTGTSSLHVYDGKFLARVERVIVVSMNYRVGA

SEQ ID NO: 15922 - protein, 33 aa, Artificial sequence
  synthetic peptide
QTGTSSLHVYDGKFLARVERVIVVSMNYRVGAL

SEQ ID NO: 15923 - protein, 33 aa, Artificial sequence
  synthetic peptide
TGTSSLHVYDGKFLARVERVIVVSMNYRVGALG

SEQ ID NO: 15924 - protein, 33 aa, Artificial sequence
  synthetic peptide
GTSSLHVYDGKFLARVERVIVVSMNYRVGALGF

SEQ ID NO: 15925 - protein, 33 aa, Artificial sequence
  synthetic peptide
TSSLHVYDGKFLARVERVIVVSMNYRVGALGFL

SEQ ID NO: 15926 - protein, 33 aa, Artificial sequence
  synthetic peptide
SSLHVYDGKFLARVERVIVVSMNYRVGALGFLA

SEQ ID NO: 15927 - protein, 33 aa, Artificial sequence
  synthetic peptide
SLHVYDGKFLARVERVIVVSMNYRVGALGFLAL

SEQ ID NO: 15928 - protein, 33 aa, Artificial sequence
  synthetic peptide
LHVYDGKFLARVERVIVVSMNYRVGALGFLALP

SEQ ID NO: 15929 - protein, 33 aa, Artificial sequence
  synthetic peptide
HVYDGKFLARVERVIVVSMNYRVGALGFLALPG

SEQ ID NO: 15930 - protein, 33 aa, Artificial sequence
  synthetic peptide
VYDGKFLARVERVIVVSMNYRVGALGFLALPGN

SEQ ID NO: 15931 - protein, 33 aa, Artificial sequence
  synthetic peptide
YDGKFLARVERVIVVSMNYRVGALGFLALPGNP

SEQ ID NO: 15932 - protein, 33 aa, Artificial sequence
  synthetic peptide
DGKFLARVERVIVVSMNYRVGALGFLALPGNPE

SEQ ID NO: 15933 - protein, 33 aa, Artificial sequence
  synthetic peptide
GKFLARVERVIVVSMNYRVGALGFLALPGNPEA

SEQ ID NO: 15934 - protein, 33 aa, Artificial sequence
  synthetic peptide
KFLARVERVIVVSMNYRVGALGFLALPGNPEAP

SEQ ID NO: 15935 - protein, 33 aa, Artificial sequence
  synthetic peptide
FLARVERVIVVSMNYRVGALGFLALPGNPEAPG

SEQ ID NO: 15936 - protein, 33 aa, Artificial sequence
  synthetic peptide
LARVERVIVVSMNYRVGALGFLALPGNPEAPGN

SEQ ID NO: 15937 - protein, 33 aa, Artificial sequence
  synthetic peptide
ARVERVIVVSMNYRVGALGFLALPGNPEAPGNM

SEQ ID NO: 15938 - protein, 33 aa, Artificial sequence
  synthetic peptide
RVERVIVVSMNYRVGALGFLALPGNPEAPGNMG

SEQ ID NO: 15939 - protein, 33 aa, Artificial sequence
  synthetic peptide
VERVIVVSMNYRVGALGFLALPGNPEAPGNMGL

SEQ ID NO: 15940 - protein, 33 aa, Artificial sequence
  synthetic peptide
ERVIVVSMNYRVGALGFLALPGNPEAPGNMGLF

SEQ ID NO: 15941 - protein, 33 aa, Artificial sequence
  synthetic peptide
RVIVVSMNYRVGALGFLALPGNPEAPGNMGLFD

SEQ ID NO: 15942 - protein, 33 aa, Artificial sequence
  synthetic peptide
VIVVSMNYRVGALGFLALPGNPEAPGNMGLFDQ

SEQ ID NO: 15943 - protein, 33 aa, Artificial sequence
  synthetic peptide
IVVSMNYRVGALGFLALPGNPEAPGNMGLFDQQ

SEQ ID NO: 15944 - protein, 33 aa, Artificial sequence
  synthetic peptide
VVSMNYRVGALGFLALPGNPEAPGNMGLFDQQL

SEQ ID NO: 15945 - protein, 33 aa, Artificial sequence
  synthetic peptide
VSMNYRVGALGFLALPGNPEAPGNMGLFDQQLA

SEQ ID NO: 15946 - protein, 33 aa, Artificial sequence
  synthetic peptide
SMNYRVGALGFLALPGNPEAPGNMGLFDQQLAL

SEQ ID NO: 15947 - protein, 33 aa, Artificial sequence
  synthetic peptide
MNYRVGALGFLALPGNPEAPGNMGLFDQQLALQ

SEQ ID NO: 15948 - protein, 33 aa, Artificial sequence
  synthetic peptide
NYRVGALGFLALPGNPEAPGNMGLFDQQLALQW

SEQ ID NO: 15949 - protein, 33 aa, Artificial sequence
  synthetic peptide
YRVGALGFLALPGNPEAPGNMGLFDQQLALQWV

SEQ ID NO: 15950 - protein, 33 aa, Artificial sequence
  synthetic peptide
RVGALGFLALPGNPEAPGNMGLFDQQLALQWVQ

SEQ ID NO: 15951 - protein, 33 aa, Artificial sequence
  synthetic peptide
VGALGFLALPGNPEAPGNMGLFDQQLALQWVQK

SEQ ID NO: 15952 - protein, 33 aa, Artificial sequence
  synthetic peptide
GALGFLALPGNPEAPGNMGLFDQQLALQWVQKN

SEQ ID NO: 15953 - protein, 33 aa, Artificial sequence
  synthetic peptide
ALGFLALPGNPEAPGNMGLFDQQLALQWVQKNI

SEQ ID NO: 15954 - protein, 33 aa, Artificial sequence
  synthetic peptide
LGFLALPGNPEAPGNMGLFDQQLALQWVQKNIA

SEQ ID NO: 15955 - protein, 33 aa, Artificial sequence
  synthetic peptide
GFLALPGNPEAPGNMGLFDQQLALQWVQKNIAA

SEQ ID NO: 15956 - protein, 33 aa, Artificial sequence
  synthetic peptide
FLALPGNPEAPGNMGLFDQQLALQWVQKNIAAF

SEQ ID NO: 15957 - protein, 33 aa, Artificial sequence
  synthetic peptide
LALPGNPEAPGNMGLFDQQLALQWVQKNIAAFG

SEQ ID NO: 15958 - protein, 33 aa, Artificial sequence
  synthetic peptide
ALPGNPEAPGNMGLFDQQLALQWVQKNIAAFGG

SEQ ID NO: 15959 - protein, 33 aa, Artificial sequence
  synthetic peptide
LPGNPEAPGNMGLFDQQLALQWVQKNIAAFGGN

SEQ ID NO: 15960 - protein, 33 aa, Artificial sequence
  synthetic peptide
PGNPEAPGNMGLFDQQLALQWVQKNIAAFGGNP

SEQ ID NO: 15961 - protein, 33 aa, Artificial sequence
  synthetic peptide
GNPEAPGNMGLFDQQLALQWVQKNIAAFGGNPK

SEQ ID NO: 15962 - protein, 33 aa, Artificial sequence
  synthetic peptide
NPEAPGNMGLFDQQLALQWVQKNIAAFGGNPKS

SEQ ID NO: 15963 - protein, 33 aa, Artificial sequence
  synthetic peptide
PEAPGNMGLFDQQLALQWVQKNIAAFGGNPKSV

SEQ ID NO: 15964 - protein, 33 aa, Artificial sequence
  synthetic peptide
EAPGNMGLFDQQLALQWVQKNIAAFGGNPKSVT

SEQ ID NO: 15965 - protein, 33 aa, Artificial sequence
  synthetic peptide
APGNMGLFDQQLALQWVQKNIAAFGGNPKSVTL

SEQ ID NO: 15966 - protein, 33 aa, Artificial sequence
  synthetic peptide
PGNMGLFDQQLALQWVQKNIAAFGGNPKSVTLF

SEQ ID NO: 15967 - protein, 33 aa, Artificial sequence
  synthetic peptide
GNMGLFDQQLALQWVQKNIAAFGGNPKSVTLFG

SEQ ID NO: 15968 - protein, 33 aa, Artificial sequence
  synthetic peptide
NMGLFDQQLALQWVQKNIAAFGGNPKSVTLFGE

SEQ ID NO: 15969 - protein, 33 aa, Artificial sequence
  synthetic peptide
MGLFDQQLALQWVQKNIAAFGGNPKSVTLFGES

SEQ ID NO: 15970 - protein, 33 aa, Artificial sequence
  synthetic peptide
GLFDQQLALQWVQKNIAAFGGNPKSVTLFGESA

SEQ ID NO: 15971 - protein, 33 aa, Artificial sequence
  synthetic peptide
LFDQQLALQWVQKNIAAFGGNPKSVTLFGESAG

SEQ ID NO: 15972 - protein, 33 aa, Artificial sequence
  synthetic peptide
FDQQLALQWVQKNIAAFGGNPKSVTLFGESAGA

SEQ ID NO: 15973 - protein, 33 aa, Artificial sequence
  synthetic peptide
DQQLALQWVQKNIAAFGGNPKSVTLFGESAGAA

SEQ ID NO: 15974 - protein, 33 aa, Artificial sequence
  synthetic peptide
QQLALQWVQKNIAAFGGNPKSVTLFGESAGAAS

SEQ ID NO: 15975 - protein, 33 aa, Artificial sequence
  synthetic peptide
QLALQWVQKNIAAFGGNPKSVTLFGESAGAASV

SEQ ID NO: 15976 - protein, 33 aa, Artificial sequence
  synthetic peptide
LALQWVQKNIAAFGGNPKSVTLFGESAGAASVS

SEQ ID NO: 15977 - protein, 33 aa, Artificial sequence
  synthetic peptide
ALQWVQKNIAAFGGNPKSVTLFGESAGAASVSL

SEQ ID NO: 15978 - protein, 33 aa, Artificial sequence
  synthetic peptide
LQWVQKNIAAFGGNPKSVTLFGESAGAASVSLH

SEQ ID NO: 15979 - protein, 33 aa, Artificial sequence
  synthetic peptide
QWVQKNIAAFGGNPKSVTLFGESAGAASVSLHL

SEQ ID NO: 15980 - protein, 33 aa, Artificial sequence
  synthetic peptide
WVQKNIAAFGGNPKSVTLFGESAGAASVSLHLL

SEQ ID NO: 15981 - protein, 33 aa, Artificial sequence
  synthetic peptide
VQKNIAAFGGNPKSVTLFGESAGAASVSLHLLS

SEQ ID NO: 15982 - protein, 33 aa, Artificial sequence
  synthetic peptide
QKNIAAFGGNPKSVTLFGESAGAASVSLHLLSP

SEQ ID NO: 15983 - protein, 33 aa, Artificial sequence
  synthetic peptide
KNIAAFGGNPKSVTLFGESAGAASVSLHLLSPG

SEQ ID NO: 15984 - protein, 33 aa, Artificial sequence
  synthetic peptide
NIAAFGGNPKSVTLFGESAGAASVSLHLLSPGS

SEQ ID NO: 15985 - protein, 33 aa, Artificial sequence
  synthetic peptide
IAAFGGNPKSVTLFGESAGAASVSLHLLSPGSH

SEQ ID NO: 15986 - protein, 33 aa, Artificial sequence
  synthetic peptide
AAFGGNPKSVTLFGESAGAASVSLHLLSPGSHS

SEQ ID NO: 15987 - protein, 33 aa, Artificial sequence
  synthetic peptide
AFGGNPKSVTLFGESAGAASVSLHLLSPGSHSL

SEQ ID NO: 15988 - protein, 33 aa, Artificial sequence
  synthetic peptide
FGGNPKSVTLFGESAGAASVSLHLLSPGSHSLF

SEQ ID NO: 15989 - protein, 33 aa, Artificial sequence
  synthetic peptide
GGNPKSVTLFGESAGAASVSLHLLSPGSHSLFT

SEQ ID NO: 15990 - protein, 33 aa, Artificial sequence
  synthetic peptide
GNPKSVTLFGESAGAASVSLHLLSPGSHSLFTR

SEQ ID NO: 15991 - protein, 33 aa, Artificial sequence
  synthetic peptide
NPKSVTLFGESAGAASVSLHLLSPGSHSLFTRA

SEQ ID NO: 15992 - protein, 33 aa, Artificial sequence
  synthetic peptide
PKSVTLFGESAGAASVSLHLLSPGSHSLFTRAI

SEQ ID NO: 15993 - protein, 33 aa, Artificial sequence
  synthetic peptide
KSVTLFGESAGAASVSLHLLSPGSHSLFTRAIL

SEQ ID NO: 15994 - protein, 33 aa, Artificial sequence
  synthetic peptide
SVTLFGESAGAASVSLHLLSPGSHSLFTRAILQ

SEQ ID NO: 15995 - protein, 33 aa, Artificial sequence
  synthetic peptide
VTLFGESAGAASVSLHLLSPGSHSLFTRAILQS

SEQ ID NO: 15996 - protein, 33 aa, Artificial sequence
  synthetic peptide
TLFGESAGAASVSLHLLSPGSHSLFTRAILQSG

SEQ ID NO: 15997 - protein, 33 aa, Artificial sequence
  synthetic peptide
LFGESAGAASVSLHLLSPGSHSLFTRAILQSGS

SEQ ID NO: 15998 - protein, 33 aa, Artificial sequence
  synthetic peptide
FGESAGAASVSLHLLSPGSHSLFTRAILQSGSF

SEQ ID NO: 15999 - protein, 33 aa, Artificial sequence
  synthetic peptide
GESAGAASVSLHLLSPGSHSLFTRAILQSGSFN

SEQ ID NO: 16000 - protein, 33 aa, Artificial sequence
  synthetic peptide
ESAGAASVSLHLLSPGSHSLFTRAILQSGSFNA

SEQ ID NO: 16001 - protein, 33 aa, Artificial sequence
  synthetic peptide
SAGAASVSLHLLSPGSHSLFTRAILQSGSFNAP

SEQ ID NO: 16002 - protein, 33 aa, Artificial sequence
  synthetic peptide
AGAASVSLHLLSPGSHSLFTRAILQSGSFNAPW

SEQ ID NO: 16003 - protein, 33 aa, Artificial sequence
  synthetic peptide
GAASVSLHLLSPGSHSLFTRAILQSGSFNAPWA

SEQ ID NO: 16004 - protein, 33 aa, Artificial sequence
  synthetic peptide
AASVSLHLLSPGSHSLFTRAILQSGSFNAPWAV

SEQ ID NO: 16005 - protein, 33 aa, Artificial sequence
  synthetic peptide
ASVSLHLLSPGSHSLFTRAILQSGSFNAPWAVT

SEQ ID NO: 16006 - protein, 33 aa, Artificial sequence
  synthetic peptide
SVSLHLLSPGSHSLFTRAILQSGSFNAPWAVTS

SEQ ID NO: 16007 - protein, 33 aa, Artificial sequence
  synthetic peptide
VSLHLLSPGSHSLFTRAILQSGSFNAPWAVTSL

SEQ ID NO: 16008 - protein, 33 aa, Artificial sequence
  synthetic peptide
SLHLLSPGSHSLFTRAILQSGSFNAPWAVTSLY

SEQ ID NO: 16009 - protein, 33 aa, Artificial sequence
  synthetic peptide
LHLLSPGSHSLFTRAILQSGSFNAPWAVTSLYE

SEQ ID NO: 16010 - protein, 33 aa, Artificial sequence
  synthetic peptide
HLLSPGSHSLFTRAILQSGSFNAPWAVTSLYEA

SEQ ID NO: 16011 - protein, 33 aa, Artificial sequence
  synthetic peptide
LLSPGSHSLFTRAILQSGSFNAPWAVTSLYEAR

SEQ ID NO: 16012 - protein, 33 aa, Artificial sequence
  synthetic peptide
LSPGSHSLFTRAILQSGSFNAPWAVTSLYEARN

SEQ ID NO: 16013 - protein, 33 aa, Artificial sequence
  synthetic peptide
SPGSHSLFTRAILQSGSFNAPWAVTSLYEARNR

SEQ ID NO: 16014 - protein, 33 aa, Artificial sequence
  synthetic peptide
PGSHSLFTRAILQSGSFNAPWAVTSLYEARNRT

SEQ ID NO: 16015 - protein, 33 aa, Artificial sequence
  synthetic peptide
GSHSLFTRAILQSGSFNAPWAVTSLYEARNRTL

SEQ ID NO: 16016 - protein, 33 aa, Artificial sequence
  synthetic peptide
SHSLFTRAILQSGSFNAPWAVTSLYEARNRTLN

SEQ ID NO: 16017 - protein, 33 aa, Artificial sequence
  synthetic peptide
HSLFTRAILQSGSFNAPWAVTSLYEARNRTLNL

SEQ ID NO: 16018 - protein, 33 aa, Artificial sequence
  synthetic peptide
SLFTRAILQSGSFNAPWAVTSLYEARNRTLNLA

SEQ ID NO: 16019 - protein, 33 aa, Artificial sequence
  synthetic peptide
LFTRAILQSGSFNAPWAVTSLYEARNRTLNLAK

SEQ ID NO: 16020 - protein, 33 aa, Artificial sequence
  synthetic peptide
FTRAILQSGSFNAPWAVTSLYEARNRTLNLAKL

SEQ ID NO: 16021 - protein, 33 aa, Artificial sequence
  synthetic peptide
TRAILQSGSFNAPWAVTSLYEARNRTLNLAKLT

SEQ ID NO: 16022 - protein, 33 aa, Artificial sequence
  synthetic peptide
RAILQSGSFNAPWAVTSLYEARNRTLNLAKLTG

SEQ ID NO: 16023 - protein, 33 aa, Artificial sequence
  synthetic peptide
AILQSGSFNAPWAVTSLYEARNRTLNLAKLTGC

SEQ ID NO: 16024 - protein, 33 aa, Artificial sequence
  synthetic peptide
ILQSGSFNAPWAVTSLYEARNRTLNLAKLTGCS

SEQ ID NO: 16025 - protein, 33 aa, Artificial sequence
  synthetic peptide
LQSGSFNAPWAVTSLYEARNRTLNLAKLTGCSR

SEQ ID NO: 16026 - protein, 33 aa, Artificial sequence
  synthetic peptide
QSGSFNAPWAVTSLYEARNRTLNLAKLTGCSRE

SEQ ID NO: 16027 - protein, 33 aa, Artificial sequence
  synthetic peptide
SGSFNAPWAVTSLYEARNRTLNLAKLTGCSREN

SEQ ID NO: 16028 - protein, 33 aa, Artificial sequence
  synthetic peptide
GSFNAPWAVTSLYEARNRTLNLAKLTGCSRENE

SEQ ID NO: 16029 - protein, 33 aa, Artificial sequence
  synthetic peptide
SFNAPWAVTSLYEARNRTLNLAKLTGCSRENET

SEQ ID NO: 16030 - protein, 33 aa, Artificial sequence
  synthetic peptide
FNAPWAVTSLYEARNRTLNLAKLTGCSRENETE

SEQ ID NO: 16031 - protein, 33 aa, Artificial sequence
  synthetic peptide
NAPWAVTSLYEARNRTLNLAKLTGCSRENETEI

SEQ ID NO: 16032 - protein, 33 aa, Artificial sequence
  synthetic peptide
APWAVTSLYEARNRTLNLAKLTGCSRENETEII

SEQ ID NO: 16033 - protein, 33 aa, Artificial sequence
  synthetic peptide
PWAVTSLYEARNRTLNLAKLTGCSRENETEIIK

SEQ ID NO: 16034 - protein, 33 aa, Artificial sequence
  synthetic peptide
WAVTSLYEARNRTLNLAKLTGCSRENETEIIKC

SEQ ID NO: 16035 - protein, 33 aa, Artificial sequence
  synthetic peptide
AVTSLYEARNRTLNLAKLTGCSRENETEIIKCL

SEQ ID NO: 16036 - protein, 33 aa, Artificial sequence
  synthetic peptide
VTSLYEARNRTLNLAKLTGCSRENETEIIKCLR

SEQ ID NO: 16037 - protein, 33 aa, Artificial sequence
  synthetic peptide
TSLYEARNRTLNLAKLTGCSRENETEIIKCLRN

SEQ ID NO: 16038 - protein, 33 aa, Artificial sequence
  synthetic peptide
SLYEARNRTLNLAKLTGCSRENETEIIKCLRNK

SEQ ID NO: 16039 - protein, 33 aa, Artificial sequence
  synthetic peptide
LYEARNRTLNLAKLTGCSRENETEIIKCLRNKD

SEQ ID NO: 16040 - protein, 33 aa, Artificial sequence
  synthetic peptide
YEARNRTLNLAKLTGCSRENETEIIKCLRNKDP

SEQ ID NO: 16041 - protein, 33 aa, Artificial sequence
  synthetic peptide
EARNRTLNLAKLTGCSRENETEIIKCLRNKDPQ

SEQ ID NO: 16042 - protein, 33 aa, Artificial sequence
  synthetic peptide
ARNRTLNLAKLTGCSRENETEIIKCLRNKDPQE

SEQ ID NO: 16043 - protein, 33 aa, Artificial sequence
  synthetic peptide
RNRTLNLAKLTGCSRENETEIIKCLRNKDPQEI

SEQ ID NO: 16044 - protein, 33 aa, Artificial sequence
  synthetic peptide
NRTLNLAKLTGCSRENETEIIKCLRNKDPQEIL

SEQ ID NO: 16045 - protein, 33 aa, Artificial sequence
  synthetic peptide
RTLNLAKLTGCSRENETEIIKCLRNKDPQEILL

SEQ ID NO: 16046 - protein, 33 aa, Artificial sequence
  synthetic peptide
TLNLAKLTGCSRENETEIIKCLRNKDPQEILLN

SEQ ID NO: 16047 - protein, 33 aa, Artificial sequence
  synthetic peptide
LNLAKLTGCSRENETEIIKCLRNKDPQEILLNE

SEQ ID NO: 16048 - protein, 33 aa, Artificial sequence
  synthetic peptide
NLAKLTGCSRENETEIIKCLRNKDPQEILLNEA

SEQ ID NO: 16049 - protein, 33 aa, Artificial sequence
  synthetic peptide
LAKLTGCSRENETEIIKCLRNKDPQEILLNEAF

SEQ ID NO: 16050 - protein, 33 aa, Artificial sequence
  synthetic peptide
AKLTGCSRENETEIIKCLRNKDPQEILLNEAFV

SEQ ID NO: 16051 - protein, 33 aa, Artificial sequence
  synthetic peptide
KLTGCSRENETEIIKCLRNKDPQEILLNEAFVV

SEQ ID NO: 16052 - protein, 33 aa, Artificial sequence
  synthetic peptide
LTGCSRENETEIIKCLRNKDPQEILLNEAFVVP

SEQ ID NO: 16053 - protein, 33 aa, Artificial sequence
  synthetic peptide
TGCSRENETEIIKCLRNKDPQEILLNEAFVVPY

SEQ ID NO: 16054 - protein, 33 aa, Artificial sequence
  synthetic peptide
GCSRENETEIIKCLRNKDPQEILLNEAFVVPYG

SEQ ID NO: 16055 - protein, 33 aa, Artificial sequence
  synthetic peptide
CSRENETEIIKCLRNKDPQEILLNEAFVVPYGT

SEQ ID NO: 16056 - protein, 33 aa, Artificial sequence
  synthetic peptide
SRENETEIIKCLRNKDPQEILLNEAFVVPYGTP

SEQ ID NO: 16057 - protein, 33 aa, Artificial sequence
  synthetic peptide
RENETEIIKCLRNKDPQEILLNEAFVVPYGTPL

SEQ ID NO: 16058 - protein, 33 aa, Artificial sequence
  synthetic peptide
ENETEIIKCLRNKDPQEILLNEAFVVPYGTPLS

SEQ ID NO: 16059 - protein, 33 aa, Artificial sequence
  synthetic peptide
NETEIIKCLRNKDPQEILLNEAFVVPYGTPLSV

SEQ ID NO: 16060 - protein, 33 aa, Artificial sequence
  synthetic peptide
ETEIIKCLRNKDPQEILLNEAFVVPYGTPLSVN

SEQ ID NO: 16061 - protein, 33 aa, Artificial sequence
  synthetic peptide
TEIIKCLRNKDPQEILLNEAFVVPYGTPLSVNF

SEQ ID NO: 16062 - protein, 33 aa, Artificial sequence
  synthetic peptide
EIIKCLRNKDPQEILLNEAFVVPYGTPLSVNFG

SEQ ID NO: 16063 - protein, 33 aa, Artificial sequence
  synthetic peptide
IIKCLRNKDPQEILLNEAFVVPYGTPLSVNFGP

SEQ ID NO: 16064 - protein, 33 aa, Artificial sequence
  synthetic peptide
IKCLRNKDPQEILLNEAFVVPYGTPLSVNFGPT

SEQ ID NO: 16065 - protein, 33 aa, Artificial sequence
  synthetic peptide
KCLRNKDPQEILLNEAFVVPYGTPLSVNFGPTV

SEQ ID NO: 16066 - protein, 33 aa, Artificial sequence
  synthetic peptide
CLRNKDPQEILLNEAFVVPYGTPLSVNFGPTVD

SEQ ID NO: 16067 - protein, 33 aa, Artificial sequence
  synthetic peptide
LRNKDPQEILLNEAFVVPYGTPLSVNFGPTVDG

SEQ ID NO: 16068 - protein, 33 aa, Artificial sequence
  synthetic peptide
RNKDPQEILLNEAFVVPYGTPLSVNFGPTVDGD

SEQ ID NO: 16069 - protein, 33 aa, Artificial sequence
  synthetic peptide
NKDPQEILLNEAFVVPYGTPLSVNFGPTVDGDF

SEQ ID NO: 16070 - protein, 33 aa, Artificial sequence
  synthetic peptide
KDPQEILLNEAFVVPYGTPLSVNFGPTVDGDFL

SEQ ID NO: 16071 - protein, 33 aa, Artificial sequence
  synthetic peptide
DPQEILLNEAFVVPYGTPLSVNFGPTVDGDFLT

SEQ ID NO: 16072 - protein, 33 aa, Artificial sequence
  synthetic peptide
PQEILLNEAFVVPYGTPLSVNFGPTVDGDFLTD

SEQ ID NO: 16073 - protein, 33 aa, Artificial sequence
  synthetic peptide
QEILLNEAFVVPYGTPLSVNFGPTVDGDFLTDM

SEQ ID NO: 16074 - protein, 33 aa, Artificial sequence
  synthetic peptide
EILLNEAFVVPYGTPLSVNFGPTVDGDFLTDMP

SEQ ID NO: 16075 - protein, 33 aa, Artificial sequence
  synthetic peptide
ILLNEAFVVPYGTPLSVNFGPTVDGDFLTDMPD

SEQ ID NO: 16076 - protein, 33 aa, Artificial sequence
  synthetic peptide
LLNEAFVVPYGTPLSVNFGPTVDGDFLTDMPDI

SEQ ID NO: 16077 - protein, 33 aa, Artificial sequence
  synthetic peptide
LNEAFVVPYGTPLSVNFGPTVDGDFLTDMPDIL

SEQ ID NO: 16078 - protein, 33 aa, Artificial sequence
  synthetic peptide
NEAFVVPYGTPLSVNFGPTVDGDFLTDMPDILL

SEQ ID NO: 16079 - protein, 33 aa, Artificial sequence
  synthetic peptide
EAFVVPYGTPLSVNFGPTVDGDFLTDMPDILLE

SEQ ID NO: 16080 - protein, 33 aa, Artificial sequence
  synthetic peptide
AFVVPYGTPLSVNFGPTVDGDFLTDMPDILLEL

SEQ ID NO: 16081 - protein, 33 aa, Artificial sequence
  synthetic peptide
FVVPYGTPLSVNFGPTVDGDFLTDMPDILLELG

SEQ ID NO: 16082 - protein, 33 aa, Artificial sequence
  synthetic peptide
VVPYGTPLSVNFGPTVDGDFLTDMPDILLELGQ

SEQ ID NO: 16083 - protein, 33 aa, Artificial sequence
  synthetic peptide
VPYGTPLSVNFGPTVDGDFLTDMPDILLELGQF

SEQ ID NO: 16084 - protein, 33 aa, Artificial sequence
  synthetic peptide
PYGTPLSVNFGPTVDGDFLTDMPDILLELGQFK

SEQ ID NO: 16085 - protein, 33 aa, Artificial sequence
  synthetic peptide
YGTPLSVNFGPTVDGDFLTDMPDILLELGQFKK

SEQ ID NO: 16086 - protein, 33 aa, Artificial sequence
  synthetic peptide
GTPLSVNFGPTVDGDFLTDMPDILLELGQFKKT

SEQ ID NO: 16087 - protein, 33 aa, Artificial sequence
  synthetic peptide
TPLSVNFGPTVDGDFLTDMPDILLELGQFKKTQ

SEQ ID NO: 16088 - protein, 33 aa, Artificial sequence
  synthetic peptide
PLSVNFGPTVDGDFLTDMPDILLELGQFKKTQI

SEQ ID NO: 16089 - protein, 33 aa, Artificial sequence
  synthetic peptide
LSVNFGPTVDGDFLTDMPDILLELGQFKKTQIL

SEQ ID NO: 16090 - protein, 33 aa, Artificial sequence
  synthetic peptide
SVNFGPTVDGDFLTDMPDILLELGQFKKTQILV

SEQ ID NO: 16091 - protein, 33 aa, Artificial sequence
  synthetic peptide
VNFGPTVDGDFLTDMPDILLELGQFKKTQILVG

SEQ ID NO: 16092 - protein, 33 aa, Artificial sequence
  synthetic peptide
NFGPTVDGDFLTDMPDILLELGQFKKTQILVGV

SEQ ID NO: 16093 - protein, 33 aa, Artificial sequence
  synthetic peptide
FGPTVDGDFLTDMPDILLELGQFKKTQILVGVN

SEQ ID NO: 16094 - protein, 33 aa, Artificial sequence
  synthetic peptide
GPTVDGDFLTDMPDILLELGQFKKTQILVGVNK

SEQ ID NO: 16095 - protein, 33 aa, Artificial sequence
  synthetic peptide
PTVDGDFLTDMPDILLELGQFKKTQILVGVNKD

SEQ ID NO: 16096 - protein, 33 aa, Artificial sequence
  synthetic peptide
TVDGDFLTDMPDILLELGQFKKTQILVGVNKDE

SEQ ID NO: 16097 - protein, 33 aa, Artificial sequence
  synthetic peptide
VDGDFLTDMPDILLELGQFKKTQILVGVNKDEG

SEQ ID NO: 16098 - protein, 33 aa, Artificial sequence
  synthetic peptide
DGDFLTDMPDILLELGQFKKTQILVGVNKDEGT

SEQ ID NO: 16099 - protein, 33 aa, Artificial sequence
  synthetic peptide
GDFLTDMPDILLELGQFKKTQILVGVNKDEGTA

SEQ ID NO: 16100 - protein, 33 aa, Artificial sequence
  synthetic peptide
DFLTDMPDILLELGQFKKTQILVGVNKDEGTAF

SEQ ID NO: 16101 - protein, 33 aa, Artificial sequence
  synthetic peptide
FLTDMPDILLELGQFKKTQILVGVNKDEGTAFL

SEQ ID NO: 16102 - protein, 33 aa, Artificial sequence
  synthetic peptide
LTDMPDILLELGQFKKTQILVGVNKDEGTAFLV

SEQ ID NO: 16103 - protein, 33 aa, Artificial sequence
  synthetic peptide
TDMPDILLELGQFKKTQILVGVNKDEGTAFLVY

SEQ ID NO: 16104 - protein, 33 aa, Artificial sequence
  synthetic peptide
DMPDILLELGQFKKTQILVGVNKDEGTAFLVYG

SEQ ID NO: 16105 - protein, 33 aa, Artificial sequence
  synthetic peptide
MPDILLELGQFKKTQILVGVNKDEGTAFLVYGA

SEQ ID NO: 16106 - protein, 33 aa, Artificial sequence
  synthetic peptide
PDILLELGQFKKTQILVGVNKDEGTAFLVYGAP

SEQ ID NO: 16107 - protein, 33 aa, Artificial sequence
  synthetic peptide
DILLELGQFKKTQILVGVNKDEGTAFLVYGAPG

SEQ ID NO: 16108 - protein, 33 aa, Artificial sequence
  synthetic peptide
ILLELGQFKKTQILVGVNKDEGTAFLVYGAPGF

SEQ ID NO: 16109 - protein, 33 aa, Artificial sequence
  synthetic peptide
LLELGQFKKTQILVGVNKDEGTAFLVYGAPGFS

SEQ ID NO: 16110 - protein, 33 aa, Artificial sequence
  synthetic peptide
LELGQFKKTQILVGVNKDEGTAFLVYGAPGFSK

SEQ ID NO: 16111 - protein, 33 aa, Artificial sequence
  synthetic peptide
ELGQFKKTQILVGVNKDEGTAFLVYGAPGFSKD

SEQ ID NO: 16112 - protein, 33 aa, Artificial sequence
  synthetic peptide
LGQFKKTQILVGVNKDEGTAFLVYGAPGFSKDN

SEQ ID NO: 16113 - protein, 33 aa, Artificial sequence
  synthetic peptide
GQFKKTQILVGVNKDEGTAFLVYGAPGFSKDNN

SEQ ID NO: 16114 - protein, 33 aa, Artificial sequence
  synthetic peptide
QFKKTQILVGVNKDEGTAFLVYGAPGFSKDNNS

SEQ ID NO: 16115 - protein, 33 aa, Artificial sequence
  synthetic peptide
FKKTQILVGVNKDEGTAFLVYGAPGFSKDNNSI

SEQ ID NO: 16116 - protein, 33 aa, Artificial sequence
  synthetic peptide
KKTQILVGVNKDEGTAFLVYGAPGFSKDNNSII

SEQ ID NO: 16117 - protein, 33 aa, Artificial sequence
  synthetic peptide
KTQILVGVNKDEGTAFLVYGAPGFSKDNNSIIT

SEQ ID NO: 16118 - protein, 33 aa, Artificial sequence
  synthetic peptide
TQILVGVNKDEGTAFLVYGAPGFSKDNNSIITR

SEQ ID NO: 16119 - protein, 33 aa, Artificial sequence
  synthetic peptide
QILVGVNKDEGTAFLVYGAPGFSKDNNSIITRK

SEQ ID NO: 16120 - protein, 33 aa, Artificial sequence
  synthetic peptide
ILVGVNKDEGTAFLVYGAPGFSKDNNSIITRKE

SEQ ID NO: 16121 - protein, 33 aa, Artificial sequence
  synthetic peptide
LVGVNKDEGTAFLVYGAPGFSKDNNSIITRKEF

SEQ ID NO: 16122 - protein, 33 aa, Artificial sequence
  synthetic peptide
VGVNKDEGTAFLVYGAPGFSKDNNSIITRKEFQ

SEQ ID NO: 16123 - protein, 33 aa, Artificial sequence
  synthetic peptide
GVNKDEGTAFLVYGAPGFSKDNNSIITRKEFQE

SEQ ID NO: 16124 - protein, 33 aa, Artificial sequence
  synthetic peptide
VNKDEGTAFLVYGAPGFSKDNNSIITRKEFQEG

SEQ ID NO: 16125 - protein, 33 aa, Artificial sequence
  synthetic peptide
NKDEGTAFLVYGAPGFSKDNNSIITRKEFQEGL

SEQ ID NO: 16126 - protein, 33 aa, Artificial sequence
  synthetic peptide
KDEGTAFLVYGAPGFSKDNNSIITRKEFQEGLK

SEQ ID NO: 16127 - protein, 33 aa, Artificial sequence
  synthetic peptide
DEGTAFLVYGAPGFSKDNNSIITRKEFQEGLKI

SEQ ID NO: 16128 - protein, 33 aa, Artificial sequence
  synthetic peptide
EGTAFLVYGAPGFSKDNNSIITRKEFQEGLKIF

SEQ ID NO: 16129 - protein, 33 aa, Artificial sequence
  synthetic peptide
GTAFLVYGAPGFSKDNNSIITRKEFQEGLKIFF

SEQ ID NO: 16130 - protein, 33 aa, Artificial sequence
  synthetic peptide
TAFLVYGAPGFSKDNNSIITRKEFQEGLKIFFP

SEQ ID NO: 16131 - protein, 33 aa, Artificial sequence
  synthetic peptide
AFLVYGAPGFSKDNNSIITRKEFQEGLKIFFPG

SEQ ID NO: 16132 - protein, 33 aa, Artificial sequence
  synthetic peptide
FLVYGAPGFSKDNNSIITRKEFQEGLKIFFPGV

SEQ ID NO: 16133 - protein, 33 aa, Artificial sequence
  synthetic peptide
LVYGAPGFSKDNNSIITRKEFQEGLKIFFPGVS

SEQ ID NO: 16134 - protein, 33 aa, Artificial sequence
  synthetic peptide
VYGAPGFSKDNNSIITRKEFQEGLKIFFPGVSE

SEQ ID NO: 16135 - protein, 33 aa, Artificial sequence
  synthetic peptide
YGAPGFSKDNNSIITRKEFQEGLKIFFPGVSEF

SEQ ID NO: 16136 - protein, 33 aa, Artificial sequence
  synthetic peptide
GAPGFSKDNNSIITRKEFQEGLKIFFPGVSEFG

SEQ ID NO: 16137 - protein, 33 aa, Artificial sequence
  synthetic peptide
APGFSKDNNSIITRKEFQEGLKIFFPGVSEFGK

SEQ ID NO: 16138 - protein, 33 aa, Artificial sequence
  synthetic peptide
PGFSKDNNSIITRKEFQEGLKIFFPGVSEFGKE

SEQ ID NO: 16139 - protein, 33 aa, Artificial sequence
  synthetic peptide
GFSKDNNSIITRKEFQEGLKIFFPGVSEFGKES

SEQ ID NO: 16140 - protein, 33 aa, Artificial sequence
  synthetic peptide
FSKDNNSIITRKEFQEGLKIFFPGVSEFGKESI

SEQ ID NO: 16141 - protein, 33 aa, Artificial sequence
  synthetic peptide
SKDNNSIITRKEFQEGLKIFFPGVSEFGKESIL

SEQ ID NO: 16142 - protein, 33 aa, Artificial sequence
  synthetic peptide
KDNNSIITRKEFQEGLKIFFPGVSEFGKESILF

SEQ ID NO: 16143 - protein, 33 aa, Artificial sequence
  synthetic peptide
DNNSIITRKEFQEGLKIFFPGVSEFGKESILFH

SEQ ID NO: 16144 - protein, 33 aa, Artificial sequence
  synthetic peptide
NNSIITRKEFQEGLKIFFPGVSEFGKESILFHY

SEQ ID NO: 16145 - protein, 33 aa, Artificial sequence
  synthetic peptide
NSIITRKEFQEGLKIFFPGVSEFGKESILFHYT

SEQ ID NO: 16146 - protein, 33 aa, Artificial sequence
  synthetic peptide
SIITRKEFQEGLKIFFPGVSEFGKESILFHYTD

SEQ ID NO: 16147 - protein, 33 aa, Artificial sequence
  synthetic peptide
IITRKEFQEGLKIFFPGVSEFGKESILFHYTDW

SEQ ID NO: 16148 - protein, 33 aa, Artificial sequence
  synthetic peptide
ITRKEFQEGLKIFFPGVSEFGKESILFHYTDWV

SEQ ID NO: 16149 - protein, 33 aa, Artificial sequence
  synthetic peptide
TRKEFQEGLKIFFPGVSEFGKESILFHYTDWVD

SEQ ID NO: 16150 - protein, 33 aa, Artificial sequence
  synthetic peptide
RKEFQEGLKIFFPGVSEFGKESILFHYTDWVDD

SEQ ID NO: 16151 - protein, 33 aa, Artificial sequence
  synthetic peptide
KEFQEGLKIFFPGVSEFGKESILFHYTDWVDDQ

SEQ ID NO: 16152 - protein, 33 aa, Artificial sequence
  synthetic peptide
EFQEGLKIFFPGVSEFGKESILFHYTDWVDDQR

SEQ ID NO: 16153 - protein, 33 aa, Artificial sequence
  synthetic peptide
FQEGLKIFFPGVSEFGKESILFHYTDWVDDQRP

SEQ ID NO: 16154 - protein, 33 aa, Artificial sequence
  synthetic peptide
QEGLKIFFPGVSEFGKESILFHYTDWVDDQRPE

SEQ ID NO: 16155 - protein, 33 aa, Artificial sequence
  synthetic peptide
EGLKIFFPGVSEFGKESILFHYTDWVDDQRPEN

SEQ ID NO: 16156 - protein, 33 aa, Artificial sequence
  synthetic peptide
GLKIFFPGVSEFGKESILFHYTDWVDDQRPENY

SEQ ID NO: 16157 - protein, 33 aa, Artificial sequence
  synthetic peptide
LKIFFPGVSEFGKESILFHYTDWVDDQRPENYR

SEQ ID NO: 16158 - protein, 33 aa, Artificial sequence
  synthetic peptide
KIFFPGVSEFGKESILFHYTDWVDDQRPENYRE

SEQ ID NO: 16159 - protein, 33 aa, Artificial sequence
  synthetic peptide
IFFPGVSEFGKESILFHYTDWVDDQRPENYREA

SEQ ID NO: 16160 - protein, 33 aa, Artificial sequence
  synthetic peptide
FFPGVSEFGKESILFHYTDWVDDQRPENYREAL

SEQ ID NO: 16161 - protein, 33 aa, Artificial sequence
  synthetic peptide
FPGVSEFGKESILFHYTDWVDDQRPENYREALG

SEQ ID NO: 16162 - protein, 33 aa, Artificial sequence
  synthetic peptide
PGVSEFGKESILFHYTDWVDDQRPENYREALGD

SEQ ID NO: 16163 - protein, 33 aa, Artificial sequence
  synthetic peptide
GVSEFGKESILFHYTDWVDDQRPENYREALGDV

SEQ ID NO: 16164 - protein, 33 aa, Artificial sequence
  synthetic peptide
VSEFGKESILFHYTDWVDDQRPENYREALGDVV

SEQ ID NO: 16165 - protein, 33 aa, Artificial sequence
  synthetic peptide
SEFGKESILFHYTDWVDDQRPENYREALGDVVG

SEQ ID NO: 16166 - protein, 33 aa, Artificial sequence
  synthetic peptide
EFGKESILFHYTDWVDDQRPENYREALGDVVGD

SEQ ID NO: 16167 - protein, 33 aa, Artificial sequence
  synthetic peptide
FGKESILFHYTDWVDDQRPENYREALGDVVGDY

SEQ ID NO: 16168 - protein, 33 aa, Artificial sequence
  synthetic peptide
GKESILFHYTDWVDDQRPENYREALGDVVGDYN

SEQ ID NO: 16169 - protein, 33 aa, Artificial sequence
  synthetic peptide
KESILFHYTDWVDDQRPENYREALGDVVGDYNF

SEQ ID NO: 16170 - protein, 33 aa, Artificial sequence
  synthetic peptide
ESILFHYTDWVDDQRPENYREALGDVVGDYNFI

SEQ ID NO: 16171 - protein, 33 aa, Artificial sequence
  synthetic peptide
SILFHYTDWVDDQRPENYREALGDVVGDYNFIC

SEQ ID NO: 16172 - protein, 33 aa, Artificial sequence
  synthetic peptide
ILFHYTDWVDDQRPENYREALGDVVGDYNFICP

SEQ ID NO: 16173 - protein, 33 aa, Artificial sequence
  synthetic peptide
LFHYTDWVDDQRPENYREALGDVVGDYNFICPA

SEQ ID NO: 16174 - protein, 33 aa, Artificial sequence
  synthetic peptide
FHYTDWVDDQRPENYREALGDVVGDYNFICPAL

SEQ ID NO: 16175 - protein, 33 aa, Artificial sequence
  synthetic peptide
HYTDWVDDQRPENYREALGDVVGDYNFICPALE

SEQ ID NO: 16176 - protein, 33 aa, Artificial sequence
  synthetic peptide
YTDWVDDQRPENYREALGDVVGDYNFICPALEF

SEQ ID NO: 16177 - protein, 33 aa, Artificial sequence
  synthetic peptide
TDWVDDQRPENYREALGDVVGDYNFICPALEFT

SEQ ID NO: 16178 - protein, 33 aa, Artificial sequence
  synthetic peptide
DWVDDQRPENYREALGDVVGDYNFICPALEFTK

SEQ ID NO: 16179 - protein, 33 aa, Artificial sequence
  synthetic peptide
WVDDQRPENYREALGDVVGDYNFICPALEFTKK

SEQ ID NO: 16180 - protein, 33 aa, Artificial sequence
  synthetic peptide
VDDQRPENYREALGDVVGDYNFICPALEFTKKF

SEQ ID NO: 16181 - protein, 33 aa, Artificial sequence
  synthetic peptide
DDQRPENYREALGDVVGDYNFICPALEFTKKFS

SEQ ID NO: 16182 - protein, 33 aa, Artificial sequence
  synthetic peptide
DQRPENYREALGDVVGDYNFICPALEFTKKFSE

SEQ ID NO: 16183 - protein, 33 aa, Artificial sequence
  synthetic peptide
QRPENYREALGDVVGDYNFICPALEFTKKFSEW

SEQ ID NO: 16184 - protein, 33 aa, Artificial sequence
  synthetic peptide
RPENYREALGDVVGDYNFICPALEFTKKFSEWG

SEQ ID NO: 16185 - protein, 33 aa, Artificial sequence
  synthetic peptide
PENYREALGDVVGDYNFICPALEFTKKFSEWGN

SEQ ID NO: 16186 - protein, 33 aa, Artificial sequence
  synthetic peptide
ENYREALGDVVGDYNFICPALEFTKKFSEWGNN

SEQ ID NO: 16187 - protein, 33 aa, Artificial sequence
  synthetic peptide
NYREALGDVVGDYNFICPALEFTKKFSEWGNNA

SEQ ID NO: 16188 - protein, 33 aa, Artificial sequence
  synthetic peptide
YREALGDVVGDYNFICPALEFTKKFSEWGNNAF

SEQ ID NO: 16189 - protein, 33 aa, Artificial sequence
  synthetic peptide
REALGDVVGDYNFICPALEFTKKFSEWGNNAFF

SEQ ID NO: 16190 - protein, 33 aa, Artificial sequence
  synthetic peptide
EALGDVVGDYNFICPALEFTKKFSEWGNNAFFY

SEQ ID NO: 16191 - protein, 33 aa, Artificial sequence
  synthetic peptide
ALGDVVGDYNFICPALEFTKKFSEWGNNAFFYY

SEQ ID NO: 16192 - protein, 33 aa, Artificial sequence
  synthetic peptide
LGDVVGDYNFICPALEFTKKFSEWGNNAFFYYF

SEQ ID NO: 16193 - protein, 33 aa, Artificial sequence
  synthetic peptide
GDVVGDYNFICPALEFTKKFSEWGNNAFFYYFE

SEQ ID NO: 16194 - protein, 33 aa, Artificial sequence
  synthetic peptide
DVVGDYNFICPALEFTKKFSEWGNNAFFYYFEH

SEQ ID NO: 16195 - protein, 33 aa, Artificial sequence
  synthetic peptide
VVGDYNFICPALEFTKKFSEWGNNAFFYYFEHR

SEQ ID NO: 16196 - protein, 33 aa, Artificial sequence
  synthetic peptide
VGDYNFICPALEFTKKFSEWGNNAFFYYFEHRS

SEQ ID NO: 16197 - protein, 33 aa, Artificial sequence
  synthetic peptide
GDYNFICPALEFTKKFSEWGNNAFFYYFEHRSS

SEQ ID NO: 16198 - protein, 33 aa, Artificial sequence
  synthetic peptide
DYNFICPALEFTKKFSEWGNNAFFYYFEHRSSK

SEQ ID NO: 16199 - protein, 33 aa, Artificial sequence
  synthetic peptide
YNFICPALEFTKKFSEWGNNAFFYYFEHRSSKL

SEQ ID NO: 16200 - protein, 33 aa, Artificial sequence
  synthetic peptide
NFICPALEFTKKFSEWGNNAFFYYFEHRSSKLP

SEQ ID NO: 16201 - protein, 33 aa, Artificial sequence
  synthetic peptide
FICPALEFTKKFSEWGNNAFFYYFEHRSSKLPW

SEQ ID NO: 16202 - protein, 33 aa, Artificial sequence
  synthetic peptide
ICPALEFTKKFSEWGNNAFFYYFEHRSSKLPWP

SEQ ID NO: 16203 - protein, 33 aa, Artificial sequence
  synthetic peptide
CPALEFTKKFSEWGNNAFFYYFEHRSSKLPWPE

SEQ ID NO: 16204 - protein, 33 aa, Artificial sequence
  synthetic peptide
PALEFTKKFSEWGNNAFFYYFEHRSSKLPWPEW

SEQ ID NO: 16205 - protein, 33 aa, Artificial sequence
  synthetic peptide
ALEFTKKFSEWGNNAFFYYFEHRSSKLPWPEWM

SEQ ID NO: 16206 - protein, 33 aa, Artificial sequence
  synthetic peptide
LEFTKKFSEWGNNAFFYYFEHRSSKLPWPEWMG

SEQ ID NO: 16207 - protein, 33 aa, Artificial sequence
  synthetic peptide
EFTKKFSEWGNNAFFYYFEHRSSKLPWPEWMGV

SEQ ID NO: 16208 - protein, 33 aa, Artificial sequence
  synthetic peptide
FTKKFSEWGNNAFFYYFEHRSSKLPWPEWMGVM

SEQ ID NO: 16209 - protein, 33 aa, Artificial sequence
  synthetic peptide
TKKFSEWGNNAFFYYFEHRSSKLPWPEWMGVMH

SEQ ID NO: 16210 - protein, 33 aa, Artificial sequence
  synthetic peptide
KKFSEWGNNAFFYYFEHRSSKLPWPEWMGVMHG

SEQ ID NO: 16211 - protein, 33 aa, Artificial sequence
  synthetic peptide
KFSEWGNNAFFYYFEHRSSKLPWPEWMGVMHGY

SEQ ID NO: 16212 - protein, 33 aa, Artificial sequence
  synthetic peptide
FSEWGNNAFFYYFEHRSSKLPWPEWMGVMHGYE

SEQ ID NO: 16213 - protein, 33 aa, Artificial sequence
  synthetic peptide
SEWGNNAFFYYFEHRSSKLPWPEWMGVMHGYEI

SEQ ID NO: 16214 - protein, 33 aa, Artificial sequence
  synthetic peptide
EWGNNAFFYYFEHRSSKLPWPEWMGVMHGYEIE

SEQ ID NO: 16215 - protein, 33 aa, Artificial sequence
  synthetic peptide
WGNNAFFYYFEHRSSKLPWPEWMGVMHGYEIEF

SEQ ID NO: 16216 - protein, 33 aa, Artificial sequence
  synthetic peptide
GNNAFFYYFEHRSSKLPWPEWMGVMHGYEIEFV

SEQ ID NO: 16217 - protein, 33 aa, Artificial sequence
  synthetic peptide
NNAFFYYFEHRSSKLPWPEWMGVMHGYEIEFVF

SEQ ID NO: 16218 - protein, 33 aa, Artificial sequence
  synthetic peptide
NAFFYYFEHRSSKLPWPEWMGVMHGYEIEFVFG

SEQ ID NO: 16219 - protein, 33 aa, Artificial sequence
  synthetic peptide
AFFYYFEHRSSKLPWPEWMGVMHGYEIEFVFGL

SEQ ID NO: 16220 - protein, 33 aa, Artificial sequence
  synthetic peptide
FFYYFEHRSSKLPWPEWMGVMHGYEIEFVFGLP

SEQ ID NO: 16221 - protein, 33 aa, Artificial sequence
  synthetic peptide
FYYFEHRSSKLPWPEWMGVMHGYEIEFVFGLPL

SEQ ID NO: 16222 - protein, 33 aa, Artificial sequence
  synthetic peptide
YYFEHRSSKLPWPEWMGVMHGYEIEFVFGLPLE

SEQ ID NO: 16223 - protein, 33 aa, Artificial sequence
  synthetic peptide
YFEHRSSKLPWPEWMGVMHGYEIEFVFGLPLER

SEQ ID NO: 16224 - protein, 33 aa, Artificial sequence
  synthetic peptide
FEHRSSKLPWPEWMGVMHGYEIEFVFGLPLERR

SEQ ID NO: 16225 - protein, 33 aa, Artificial sequence
  synthetic peptide
EHRSSKLPWPEWMGVMHGYEIEFVFGLPLERRD

SEQ ID NO: 16226 - protein, 33 aa, Artificial sequence
  synthetic peptide
HRSSKLPWPEWMGVMHGYEIEFVFGLPLERRDN

SEQ ID NO: 16227 - protein, 33 aa, Artificial sequence
  synthetic peptide
RSSKLPWPEWMGVMHGYEIEFVFGLPLERRDNY

SEQ ID NO: 16228 - protein, 33 aa, Artificial sequence
  synthetic peptide
SSKLPWPEWMGVMHGYEIEFVFGLPLERRDNYT

SEQ ID NO: 16229 - protein, 33 aa, Artificial sequence
  synthetic peptide
SKLPWPEWMGVMHGYEIEFVFGLPLERRDNYTK

SEQ ID NO: 16230 - protein, 33 aa, Artificial sequence
  synthetic peptide
KLPWPEWMGVMHGYEIEFVFGLPLERRDNYTKA

SEQ ID NO: 16231 - protein, 33 aa, Artificial sequence
  synthetic peptide
LPWPEWMGVMHGYEIEFVFGLPLERRDNYTKAE

SEQ ID NO: 16232 - protein, 33 aa, Artificial sequence
  synthetic peptide
PWPEWMGVMHGYEIEFVFGLPLERRDNYTKAEE

SEQ ID NO: 16233 - protein, 33 aa, Artificial sequence
  synthetic peptide
WPEWMGVMHGYEIEFVFGLPLERRDNYTKAEEI

SEQ ID NO: 16234 - protein, 33 aa, Artificial sequence
  synthetic peptide
PEWMGVMHGYEIEFVFGLPLERRDNYTKAEEIL

SEQ ID NO: 16235 - protein, 33 aa, Artificial sequence
  synthetic peptide
EWMGVMHGYEIEFVFGLPLERRDNYTKAEEILS

SEQ ID NO: 16236 - protein, 33 aa, Artificial sequence
  synthetic peptide
WMGVMHGYEIEFVFGLPLERRDNYTKAEEILSR

SEQ ID NO: 16237 - protein, 33 aa, Artificial sequence
  synthetic peptide
MGVMHGYEIEFVFGLPLERRDNYTKAEEILSRS

SEQ ID NO: 16238 - protein, 33 aa, Artificial sequence
  synthetic peptide
GVMHGYEIEFVFGLPLERRDNYTKAEEILSRSI

SEQ ID NO: 16239 - protein, 33 aa, Artificial sequence
  synthetic peptide
VMHGYEIEFVFGLPLERRDNYTKAEEILSRSIV

SEQ ID NO: 16240 - protein, 33 aa, Artificial sequence
  synthetic peptide
MHGYEIEFVFGLPLERRDNYTKAEEILSRSIVK

SEQ ID NO: 16241 - protein, 33 aa, Artificial sequence
  synthetic peptide
HGYEIEFVFGLPLERRDNYTKAEEILSRSIVKR

SEQ ID NO: 16242 - protein, 33 aa, Artificial sequence
  synthetic peptide
GYEIEFVFGLPLERRDNYTKAEEILSRSIVKRW

SEQ ID NO: 16243 - protein, 33 aa, Artificial sequence
  synthetic peptide
YEIEFVFGLPLERRDNYTKAEEILSRSIVKRWA

SEQ ID NO: 16244 - protein, 33 aa, Artificial sequence
  synthetic peptide
EIEFVFGLPLERRDNYTKAEEILSRSIVKRWAN

SEQ ID NO: 16245 - protein, 33 aa, Artificial sequence
  synthetic peptide
IEFVFGLPLERRDNYTKAEEILSRSIVKRWANF

SEQ ID NO: 16246 - protein, 33 aa, Artificial sequence
  synthetic peptide
EFVFGLPLERRDNYTKAEEILSRSIVKRWANFA

SEQ ID NO: 16247 - protein, 33 aa, Artificial sequence
  synthetic peptide
FVFGLPLERRDNYTKAEEILSRSIVKRWANFAK

SEQ ID NO: 16248 - protein, 33 aa, Artificial sequence
  synthetic peptide
VFGLPLERRDNYTKAEEILSRSIVKRWANFAKY

SEQ ID NO: 16249 - protein, 33 aa, Artificial sequence
  synthetic peptide
FGLPLERRDNYTKAEEILSRSIVKRWANFAKYG

SEQ ID NO: 16250 - protein, 33 aa, Artificial sequence
  synthetic peptide
GLPLERRDNYTKAEEILSRSIVKRWANFAKYGN

SEQ ID NO: 16251 - protein, 33 aa, Artificial sequence
  synthetic peptide
LPLERRDNYTKAEEILSRSIVKRWANFAKYGNP

SEQ ID NO: 16252 - protein, 33 aa, Artificial sequence
  synthetic peptide
PLERRDNYTKAEEILSRSIVKRWANFAKYGNPN

SEQ ID NO: 16253 - protein, 33 aa, Artificial sequence
  synthetic peptide
LERRDNYTKAEEILSRSIVKRWANFAKYGNPNE

SEQ ID NO: 16254 - protein, 33 aa, Artificial sequence
  synthetic peptide
ERRDNYTKAEEILSRSIVKRWANFAKYGNPNET

SEQ ID NO: 16255 - protein, 33 aa, Artificial sequence
  synthetic peptide
RRDNYTKAEEILSRSIVKRWANFAKYGNPNETQ

SEQ ID NO: 16256 - protein, 33 aa, Artificial sequence
  synthetic peptide
RDNYTKAEEILSRSIVKRWANFAKYGNPNETQN

SEQ ID NO: 16257 - protein, 33 aa, Artificial sequence
  synthetic peptide
DNYTKAEEILSRSIVKRWANFAKYGNPNETQNN

SEQ ID NO: 16258 - protein, 33 aa, Artificial sequence
  synthetic peptide
NYTKAEEILSRSIVKRWANFAKYGNPNETQNNS

SEQ ID NO: 16259 - protein, 33 aa, Artificial sequence
  synthetic peptide
YTKAEEILSRSIVKRWANFAKYGNPNETQNNST

SEQ ID NO: 16260 - protein, 33 aa, Artificial sequence
  synthetic peptide
TKAEEILSRSIVKRWANFAKYGNPNETQNNSTS

SEQ ID NO: 16261 - protein, 33 aa, Artificial sequence
  synthetic peptide
KAEEILSRSIVKRWANFAKYGNPNETQNNSTSW

SEQ ID NO: 16262 - protein, 33 aa, Artificial sequence
  synthetic peptide
AEEILSRSIVKRWANFAKYGNPNETQNNSTSWP

SEQ ID NO: 16263 - protein, 33 aa, Artificial sequence
  synthetic peptide
EEILSRSIVKRWANFAKYGNPNETQNNSTSWPV

SEQ ID NO: 16264 - protein, 33 aa, Artificial sequence
  synthetic peptide
EILSRSIVKRWANFAKYGNPNETQNNSTSWPVF

SEQ ID NO: 16265 - protein, 33 aa, Artificial sequence
  synthetic peptide
ILSRSIVKRWANFAKYGNPNETQNNSTSWPVFK

SEQ ID NO: 16266 - protein, 33 aa, Artificial sequence
  synthetic peptide
LSRSIVKRWANFAKYGNPNETQNNSTSWPVFKS

SEQ ID NO: 16267 - protein, 33 aa, Artificial sequence
  synthetic peptide
SRSIVKRWANFAKYGNPNETQNNSTSWPVFKST

SEQ ID NO: 16268 - protein, 33 aa, Artificial sequence
  synthetic peptide
RSIVKRWANFAKYGNPNETQNNSTSWPVFKSTE

SEQ ID NO: 16269 - protein, 33 aa, Artificial sequence
  synthetic peptide
SIVKRWANFAKYGNPNETQNNSTSWPVFKSTEQ

SEQ ID NO: 16270 - protein, 33 aa, Artificial sequence
  synthetic peptide
IVKRWANFAKYGNPNETQNNSTSWPVFKSTEQK

SEQ ID NO: 16271 - protein, 33 aa, Artificial sequence
  synthetic peptide
VKRWANFAKYGNPNETQNNSTSWPVFKSTEQKY

SEQ ID NO: 16272 - protein, 33 aa, Artificial sequence
  synthetic peptide
KRWANFAKYGNPNETQNNSTSWPVFKSTEQKYL

SEQ ID NO: 16273 - protein, 33 aa, Artificial sequence
  synthetic peptide
RWANFAKYGNPNETQNNSTSWPVFKSTEQKYLT

SEQ ID NO: 16274 - protein, 33 aa, Artificial sequence
  synthetic peptide
WANFAKYGNPNETQNNSTSWPVFKSTEQKYLTL

SEQ ID NO: 16275 - protein, 33 aa, Artificial sequence
  synthetic peptide
ANFAKYGNPNETQNNSTSWPVFKSTEQKYLTLN

SEQ ID NO: 16276 - protein, 33 aa, Artificial sequence
  synthetic peptide
NFAKYGNPNETQNNSTSWPVFKSTEQKYLTLNT

SEQ ID NO: 16277 - protein, 33 aa, Artificial sequence
  synthetic peptide
FAKYGNPNETQNNSTSWPVFKSTEQKYLTLNTE

SEQ ID NO: 16278 - protein, 33 aa, Artificial sequence
  synthetic peptide
AKYGNPNETQNNSTSWPVFKSTEQKYLTLNTES

SEQ ID NO: 16279 - protein, 33 aa, Artificial sequence
  synthetic peptide
KYGNPNETQNNSTSWPVFKSTEQKYLTLNTEST

SEQ ID NO: 16280 - protein, 33 aa, Artificial sequence
  synthetic peptide
YGNPNETQNNSTSWPVFKSTEQKYLTLNTESTR

SEQ ID NO: 16281 - protein, 33 aa, Artificial sequence
  synthetic peptide
GNPNETQNNSTSWPVFKSTEQKYLTLNTESTRI

SEQ ID NO: 16282 - protein, 33 aa, Artificial sequence
  synthetic peptide
NPNETQNNSTSWPVFKSTEQKYLTLNTESTRIM

SEQ ID NO: 16283 - protein, 33 aa, Artificial sequence
  synthetic peptide
PNETQNNSTSWPVFKSTEQKYLTLNTESTRIMT

SEQ ID NO: 16284 - protein, 33 aa, Artificial sequence
  synthetic peptide
NETQNNSTSWPVFKSTEQKYLTLNTESTRIMTK

SEQ ID NO: 16285 - protein, 33 aa, Artificial sequence
  synthetic peptide
ETQNNSTSWPVFKSTEQKYLTLNTESTRIMTKL

SEQ ID NO: 16286 - protein, 33 aa, Artificial sequence
  synthetic peptide
TQNNSTSWPVFKSTEQKYLTLNTESTRIMTKLR

SEQ ID NO: 16287 - protein, 33 aa, Artificial sequence
  synthetic peptide
QNNSTSWPVFKSTEQKYLTLNTESTRIMTKLRA

SEQ ID NO: 16288 - protein, 33 aa, Artificial sequence
  synthetic peptide
NNSTSWPVFKSTEQKYLTLNTESTRIMTKLRAQ

SEQ ID NO: 16289 - protein, 33 aa, Artificial sequence
  synthetic peptide
NSTSWPVFKSTEQKYLTLNTESTRIMTKLRAQQ

SEQ ID NO: 16290 - protein, 33 aa, Artificial sequence
  synthetic peptide
STSWPVFKSTEQKYLTLNTESTRIMTKLRAQQC

SEQ ID NO: 16291 - protein, 33 aa, Artificial sequence
  synthetic peptide
TSWPVFKSTEQKYLTLNTESTRIMTKLRAQQCR

SEQ ID NO: 16292 - protein, 33 aa, Artificial sequence
  synthetic peptide
SWPVFKSTEQKYLTLNTESTRIMTKLRAQQCRF

SEQ ID NO: 16293 - protein, 33 aa, Artificial sequence
  synthetic peptide
WPVFKSTEQKYLTLNTESTRIMTKLRAQQCRFW

SEQ ID NO: 16294 - protein, 33 aa, Artificial sequence
  synthetic peptide
PVFKSTEQKYLTLNTESTRIMTKLRAQQCRFWT

SEQ ID NO: 16295 - protein, 33 aa, Artificial sequence
  synthetic peptide
VFKSTEQKYLTLNTESTRIMTKLRAQQCRFWTS

SEQ ID NO: 16296 - protein, 33 aa, Artificial sequence
  synthetic peptide
FKSTEQKYLTLNTESTRIMTKLRAQQCRFWTSF

SEQ ID NO: 16297 - protein, 33 aa, Artificial sequence
  synthetic peptide
KSTEQKYLTLNTESTRIMTKLRAQQCRFWTSFF

SEQ ID NO: 16298 - protein, 33 aa, Artificial sequence
  synthetic peptide
STEQKYLTLNTESTRIMTKLRAQQCRFWTSFFP

SEQ ID NO: 16299 - protein, 33 aa, Artificial sequence
  synthetic peptide
TEQKYLTLNTESTRIMTKLRAQQCRFWTSFFPK

SEQ ID NO: 16300 - protein, 33 aa, Artificial sequence
  synthetic peptide
EQKYLTLNTESTRIMTKLRAQQCRFWTSFFPKV

SEQ ID NO: 16301 - protein, 33 aa, Artificial sequence
  synthetic peptide
QKYLTLNTESTRIMTKLRAQQCRFWTSFFPKVL

SEQ ID NO: 16302 - protein, 33 aa, Artificial sequence
  synthetic peptide
KYLTLNTESTRIMTKLRAQQCRFWTSFFPKVLE

SEQ ID NO: 16303 - protein, 33 aa, Artificial sequence
  synthetic peptide
YLTLNTESTRIMTKLRAQQCRFWTSFFPKVLEM

SEQ ID NO: 16304 - protein, 33 aa, Artificial sequence
  synthetic peptide
LTLNTESTRIMTKLRAQQCRFWTSFFPKVLEMT

SEQ ID NO: 16305 - protein, 33 aa, Artificial sequence
  synthetic peptide
TLNTESTRIMTKLRAQQCRFWTSFFPKVLEMTG

SEQ ID NO: 16306 - protein, 33 aa, Artificial sequence
  synthetic peptide
LNTESTRIMTKLRAQQCRFWTSFFPKVLEMTGN

SEQ ID NO: 16307 - protein, 33 aa, Artificial sequence
  synthetic peptide
NTESTRIMTKLRAQQCRFWTSFFPKVLEMTGNI

SEQ ID NO: 16308 - protein, 33 aa, Artificial sequence
  synthetic peptide
TESTRIMTKLRAQQCRFWTSFFPKVLEMTGNID

SEQ ID NO: 16309 - protein, 33 aa, Artificial sequence
  synthetic peptide
ESTRIMTKLRAQQCRFWTSFFPKVLEMTGNIDE

SEQ ID NO: 16310 - protein, 33 aa, Artificial sequence
  synthetic peptide
STRIMTKLRAQQCRFWTSFFPKVLEMTGNIDEA

SEQ ID NO: 16311 - protein, 33 aa, Artificial sequence
  synthetic peptide
TRIMTKLRAQQCRFWTSFFPKVLEMTGNIDEAE

SEQ ID NO: 16312 - protein, 33 aa, Artificial sequence
  synthetic peptide
RIMTKLRAQQCRFWTSFFPKVLEMTGNIDEAEW

SEQ ID NO: 16313 - protein, 33 aa, Artificial sequence
  synthetic peptide
IMTKLRAQQCRFWTSFFPKVLEMTGNIDEAEWE

SEQ ID NO: 16314 - protein, 33 aa, Artificial sequence
  synthetic peptide
MTKLRAQQCRFWTSFFPKVLEMTGNIDEAEWEW

SEQ ID NO: 16315 - protein, 33 aa, Artificial sequence
  synthetic peptide
TKLRAQQCRFWTSFFPKVLEMTGNIDEAEWEWK

SEQ ID NO: 16316 - protein, 33 aa, Artificial sequence
  synthetic peptide
KLRAQQCRFWTSFFPKVLEMTGNIDEAEWEWKA

SEQ ID NO: 16317 - protein, 33 aa, Artificial sequence
  synthetic peptide
LRAQQCRFWTSFFPKVLEMTGNIDEAEWEWKAG

SEQ ID NO: 16318 - protein, 33 aa, Artificial sequence
  synthetic peptide
RAQQCRFWTSFFPKVLEMTGNIDEAEWEWKAGF

SEQ ID NO: 16319 - protein, 33 aa, Artificial sequence
  synthetic peptide
AQQCRFWTSFFPKVLEMTGNIDEAEWEWKAGFH

SEQ ID NO: 16320 - protein, 33 aa, Artificial sequence
  synthetic peptide
QQCRFWTSFFPKVLEMTGNIDEAEWEWKAGFHR

SEQ ID NO: 16321 - protein, 33 aa, Artificial sequence
  synthetic peptide
QCRFWTSFFPKVLEMTGNIDEAEWEWKAGFHRW

SEQ ID NO: 16322 - protein, 33 aa, Artificial sequence
  synthetic peptide
CRFWTSFFPKVLEMTGNIDEAEWEWKAGFHRWN

SEQ ID NO: 16323 - protein, 33 aa, Artificial sequence
  synthetic peptide
RFWTSFFPKVLEMTGNIDEAEWEWKAGFHRWNN

SEQ ID NO: 16324 - protein, 33 aa, Artificial sequence
  synthetic peptide
FWTSFFPKVLEMTGNIDEAEWEWKAGFHRWNNY

SEQ ID NO: 16325 - protein, 33 aa, Artificial sequence
  synthetic peptide
WTSFFPKVLEMTGNIDEAEWEWKAGFHRWNNYM

SEQ ID NO: 16326 - protein, 33 aa, Artificial sequence
  synthetic peptide
TSFFPKVLEMTGNIDEAEWEWKAGFHRWNNYMM

SEQ ID NO: 16327 - protein, 33 aa, Artificial sequence
  synthetic peptide
SFFPKVLEMTGNIDEAEWEWKAGFHRWNNYMMD

SEQ ID NO: 16328 - protein, 33 aa, Artificial sequence
  synthetic peptide
FFPKVLEMTGNIDEAEWEWKAGFHRWNNYMMDW

SEQ ID NO: 16329 - protein, 33 aa, Artificial sequence
  synthetic peptide
FPKVLEMTGNIDEAEWEWKAGFHRWNNYMMDWK

SEQ ID NO: 16330 - protein, 33 aa, Artificial sequence
  synthetic peptide
PKVLEMTGNIDEAEWEWKAGFHRWNNYMMDWKN

SEQ ID NO: 16331 - protein, 33 aa, Artificial sequence
  synthetic peptide
KVLEMTGNIDEAEWEWKAGFHRWNNYMMDWKNQ

SEQ ID NO: 16332 - protein, 33 aa, Artificial sequence
  synthetic peptide
VLEMTGNIDEAEWEWKAGFHRWNNYMMDWKNQF

SEQ ID NO: 16333 - protein, 33 aa, Artificial sequence
  synthetic peptide
LEMTGNIDEAEWEWKAGFHRWNNYMMDWKNQFN

SEQ ID NO: 16334 - protein, 33 aa, Artificial sequence
  synthetic peptide
EMTGNIDEAEWEWKAGFHRWNNYMMDWKNQFND

SEQ ID NO: 16335 - protein, 33 aa, Artificial sequence
  synthetic peptide
MTGNIDEAEWEWKAGFHRWNNYMMDWKNQFNDY

SEQ ID NO: 16336 - protein, 33 aa, Artificial sequence
  synthetic peptide
TGNIDEAEWEWKAGFHRWNNYMMDWKNQFNDYT

SEQ ID NO: 16337 - protein, 33 aa, Artificial sequence
  synthetic peptide
GNIDEAEWEWKAGFHRWNNYMMDWKNQFNDYTS

SEQ ID NO: 16338 - protein, 33 aa, Artificial sequence
  synthetic peptide
NIDEAEWEWKAGFHRWNNYMMDWKNQFNDYTSK

SEQ ID NO: 16339 - protein, 33 aa, Artificial sequence
  synthetic peptide
IDEAEWEWKAGFHRWNNYMMDWKNQFNDYTSKK

SEQ ID NO: 16340 - protein, 33 aa, Artificial sequence
  synthetic peptide
DEAEWEWKAGFHRWNNYMMDWKNQFNDYTSKKE

SEQ ID NO: 16341 - protein, 33 aa, Artificial sequence
  synthetic peptide
EAEWEWKAGFHRWNNYMMDWKNQFNDYTSKKES

SEQ ID NO: 16342 - protein, 33 aa, Artificial sequence
  synthetic peptide
AEWEWKAGFHRWNNYMMDWKNQFNDYTSKKESC

SEQ ID NO: 16343 - protein, 33 aa, Artificial sequence
  synthetic peptide
EWEWKAGFHRWNNYMMDWKNQFNDYTSKKESCV

SEQ ID NO: 16344 - protein, 33 aa, Artificial sequence
  synthetic peptide
WEWKAGFHRWNNYMMDWKNQFNDYTSKKESCVG

SEQ ID NO: 16345 - protein, 33 aa, Artificial sequence
  synthetic peptide
EWKAGFHRWNNYMMDWKNQFNDYTSKKESCVGL

SEQ ID NO: 16346 - protein, 34 aa, Artificial sequence
  synthetic peptide
MHSKVTIICIRFLFWFLLLCMLIGKSHTEDDIII

SEQ ID NO: 16347 - protein, 34 aa, Artificial sequence
  synthetic peptide
HSKVTIICIRFLFWFLLLCMLIGKSHTEDDIIIA

SEQ ID NO: 16348 - protein, 34 aa, Artificial sequence
  synthetic peptide
SKVTIICIRFLFWFLLLCMLIGKSHTEDDIIIAT

SEQ ID NO: 16349 - protein, 34 aa, Artificial sequence
  synthetic peptide
KVTIICIRFLFWFLLLCMLIGKSHTEDDIIIATK

SEQ ID NO: 16350 - protein, 34 aa, Artificial sequence
  synthetic peptide
VTIICIRFLFWFLLLCMLIGKSHTEDDIIIATKN

SEQ ID NO: 16351 - protein, 34 aa, Artificial sequence
  synthetic peptide
TIICIRFLFWFLLLCMLIGKSHTEDDIIIATKNG

SEQ ID NO: 16352 - protein, 34 aa, Artificial sequence
  synthetic peptide
IICIRFLFWFLLLCMLIGKSHTEDDIIIATKNGK

SEQ ID NO: 16353 - protein, 34 aa, Artificial sequence
  synthetic peptide
ICIRFLFWFLLLCMLIGKSHTEDDIIIATKNGKV

SEQ ID NO: 16354 - protein, 34 aa, Artificial sequence
  synthetic peptide
CIRFLFWFLLLCMLIGKSHTEDDIIIATKNGKVR

SEQ ID NO: 16355 - protein, 34 aa, Artificial sequence
  synthetic peptide
IRFLFWFLLLCMLIGKSHTEDDIIIATKNGKVRG

SEQ ID NO: 16356 - protein, 34 aa, Artificial sequence
  synthetic peptide
RFLFWFLLLCMLIGKSHTEDDIIIATKNGKVRGM

SEQ ID NO: 16357 - protein, 34 aa, Artificial sequence
  synthetic peptide
FLFWFLLLCMLIGKSHTEDDIIIATKNGKVRGMN

SEQ ID NO: 16358 - protein, 34 aa, Artificial sequence
  synthetic peptide
LFWFLLLCMLIGKSHTEDDIIIATKNGKVRGMNL

SEQ ID NO: 16359 - protein, 34 aa, Artificial sequence
  synthetic peptide
FWFLLLCMLIGKSHTEDDIIIATKNGKVRGMNLT

SEQ ID NO: 16360 - protein, 34 aa, Artificial sequence
  synthetic peptide
WFLLLCMLIGKSHTEDDIIIATKNGKVRGMNLTV

SEQ ID NO: 16361 - protein, 34 aa, Artificial sequence
  synthetic peptide
FLLLCMLIGKSHTEDDIIIATKNGKVRGMNLTVF

SEQ ID NO: 16362 - protein, 34 aa, Artificial sequence
  synthetic peptide
LLLCMLIGKSHTEDDIIIATKNGKVRGMNLTVFG

SEQ ID NO: 16363 - protein, 34 aa, Artificial sequence
  synthetic peptide
LLCMLIGKSHTEDDIIIATKNGKVRGMNLTVFGG

SEQ ID NO: 16364 - protein, 34 aa, Artificial sequence
  synthetic peptide
LCMLIGKSHTEDDIIIATKNGKVRGMNLTVFGGT

SEQ ID NO: 16365 - protein, 34 aa, Artificial sequence
  synthetic peptide
CMLIGKSHTEDDIIIATKNGKVRGMNLTVFGGTV

SEQ ID NO: 16366 - protein, 34 aa, Artificial sequence
  synthetic peptide
MLIGKSHTEDDIIIATKNGKVRGMNLTVFGGTVT

SEQ ID NO: 16367 - protein, 34 aa, Artificial sequence
  synthetic peptide
LIGKSHTEDDIIIATKNGKVRGMNLTVFGGTVTA

SEQ ID NO: 16368 - protein, 34 aa, Artificial sequence
  synthetic peptide
IGKSHTEDDIIIATKNGKVRGMNLTVFGGTVTAF

SEQ ID NO: 16369 - protein, 34 aa, Artificial sequence
  synthetic peptide
GKSHTEDDIIIATKNGKVRGMNLTVFGGTVTAFL

SEQ ID NO: 16370 - protein, 34 aa, Artificial sequence
  synthetic peptide
KSHTEDDIIIATKNGKVRGMNLTVFGGTVTAFLG

SEQ ID NO: 16371 - protein, 34 aa, Artificial sequence
  synthetic peptide
SHTEDDIIIATKNGKVRGMNLTVFGGTVTAFLGI

SEQ ID NO: 16372 - protein, 34 aa, Artificial sequence
  synthetic peptide
HTEDDIIIATKNGKVRGMNLTVFGGTVTAFLGIP

SEQ ID NO: 16373 - protein, 34 aa, Artificial sequence
  synthetic peptide
TEDDIIIATKNGKVRGMNLTVFGGTVTAFLGIPY

SEQ ID NO: 16374 - protein, 34 aa, Artificial sequence
  synthetic peptide
EDDIIIATKNGKVRGMNLTVFGGTVTAFLGIPYA

SEQ ID NO: 16375 - protein, 34 aa, Artificial sequence
  synthetic peptide
DDIIIATKNGKVRGMNLTVFGGTVTAFLGIPYAQ

SEQ ID NO: 16376 - protein, 34 aa, Artificial sequence
  synthetic peptide
DIIIATKNGKVRGMNLTVFGGTVTAFLGIPYAQP

SEQ ID NO: 16377 - protein, 34 aa, Artificial sequence
  synthetic peptide
IIIATKNGKVRGMNLTVFGGTVTAFLGIPYAQPP

SEQ ID NO: 16378 - protein, 34 aa, Artificial sequence
  synthetic peptide
IIATKNGKVRGMNLTVFGGTVTAFLGIPYAQPPL

SEQ ID NO: 16379 - protein, 34 aa, Artificial sequence
  synthetic peptide
IATKNGKVRGMNLTVFGGTVTAFLGIPYAQPPLG

SEQ ID NO: 16380 - protein, 34 aa, Artificial sequence
  synthetic peptide
ATKNGKVRGMNLTVFGGTVTAFLGIPYAQPPLGR

SEQ ID NO: 16381 - protein, 34 aa, Artificial sequence
  synthetic peptide
TKNGKVRGMNLTVFGGTVTAFLGIPYAQPPLGRL

SEQ ID NO: 16382 - protein, 34 aa, Artificial sequence
  synthetic peptide
KNGKVRGMNLTVFGGTVTAFLGIPYAQPPLGRLR

SEQ ID NO: 16383 - protein, 34 aa, Artificial sequence
  synthetic peptide
NGKVRGMNLTVFGGTVTAFLGIPYAQPPLGRLRF

SEQ ID NO: 16384 - protein, 34 aa, Artificial sequence
  synthetic peptide
GKVRGMNLTVFGGTVTAFLGIPYAQPPLGRLRFK

SEQ ID NO: 16385 - protein, 34 aa, Artificial sequence
  synthetic peptide
KVRGMNLTVFGGTVTAFLGIPYAQPPLGRLRFKK

SEQ ID NO: 16386 - protein, 34 aa, Artificial sequence
  synthetic peptide
VRGMNLTVFGGTVTAFLGIPYAQPPLGRLRFKKP

SEQ ID NO: 16387 - protein, 34 aa, Artificial sequence
  synthetic peptide
RGMNLTVFGGTVTAFLGIPYAQPPLGRLRFKKPQ

SEQ ID NO: 16388 - protein, 34 aa, Artificial sequence
  synthetic peptide
GMNLTVFGGTVTAFLGIPYAQPPLGRLRFKKPQS

SEQ ID NO: 16389 - protein, 34 aa, Artificial sequence
  synthetic peptide
MNLTVFGGTVTAFLGIPYAQPPLGRLRFKKPQSL

SEQ ID NO: 16390 - protein, 34 aa, Artificial sequence
  synthetic peptide
NLTVFGGTVTAFLGIPYAQPPLGRLRFKKPQSLT

SEQ ID NO: 16391 - protein, 34 aa, Artificial sequence
  synthetic peptide
LTVFGGTVTAFLGIPYAQPPLGRLRFKKPQSLTK

SEQ ID NO: 16392 - protein, 34 aa, Artificial sequence
  synthetic peptide
TVFGGTVTAFLGIPYAQPPLGRLRFKKPQSLTKW

SEQ ID NO: 16393 - protein, 34 aa, Artificial sequence
  synthetic peptide
VFGGTVTAFLGIPYAQPPLGRLRFKKPQSLTKWS

SEQ ID NO: 16394 - protein, 34 aa, Artificial sequence
  synthetic peptide
FGGTVTAFLGIPYAQPPLGRLRFKKPQSLTKWSD

SEQ ID NO: 16395 - protein, 34 aa, Artificial sequence
  synthetic peptide
GGTVTAFLGIPYAQPPLGRLRFKKPQSLTKWSDI

SEQ ID NO: 16396 - protein, 34 aa, Artificial sequence
  synthetic peptide
GTVTAFLGIPYAQPPLGRLRFKKPQSLTKWSDIW

SEQ ID NO: 16397 - protein, 34 aa, Artificial sequence
  synthetic peptide
TVTAFLGIPYAQPPLGRLRFKKPQSLTKWSDIWN

SEQ ID NO: 16398 - protein, 34 aa, Artificial sequence
  synthetic peptide
VTAFLGIPYAQPPLGRLRFKKPQSLTKWSDIWNA

SEQ ID NO: 16399 - protein, 34 aa, Artificial sequence
  synthetic peptide
TAFLGIPYAQPPLGRLRFKKPQSLTKWSDIWNAT

SEQ ID NO: 16400 - protein, 34 aa, Artificial sequence
  synthetic peptide
AFLGIPYAQPPLGRLRFKKPQSLTKWSDIWNATK

SEQ ID NO: 16401 - protein, 34 aa, Artificial sequence
  synthetic peptide
FLGIPYAQPPLGRLRFKKPQSLTKWSDIWNATKY

SEQ ID NO: 16402 - protein, 34 aa, Artificial sequence
  synthetic peptide
LGIPYAQPPLGRLRFKKPQSLTKWSDIWNATKYA

SEQ ID NO: 16403 - protein, 34 aa, Artificial sequence
  synthetic peptide
GIPYAQPPLGRLRFKKPQSLTKWSDIWNATKYAN

SEQ ID NO: 16404 - protein, 34 aa, Artificial sequence
  synthetic peptide
IPYAQPPLGRLRFKKPQSLTKWSDIWNATKYANS

SEQ ID NO: 16405 - protein, 34 aa, Artificial sequence
  synthetic peptide
PYAQPPLGRLRFKKPQSLTKWSDIWNATKYANSC

SEQ ID NO: 16406 - protein, 34 aa, Artificial sequence
  synthetic peptide
YAQPPLGRLRFKKPQSLTKWSDIWNATKYANSCC

SEQ ID NO: 16407 - protein, 34 aa, Artificial sequence
  synthetic peptide
AQPPLGRLRFKKPQSLTKWSDIWNATKYANSCCQ

SEQ ID NO: 16408 - protein, 34 aa, Artificial sequence
  synthetic peptide
QPPLGRLRFKKPQSLTKWSDIWNATKYANSCCQN

SEQ ID NO: 16409 - protein, 34 aa, Artificial sequence
  synthetic peptide
PPLGRLRFKKPQSLTKWSDIWNATKYANSCCQNI

SEQ ID NO: 16410 - protein, 34 aa, Artificial sequence
  synthetic peptide
PLGRLRFKKPQSLTKWSDIWNATKYANSCCQNID

SEQ ID NO: 16411 - protein, 34 aa, Artificial sequence
  synthetic peptide
LGRLRFKKPQSLTKWSDIWNATKYANSCCQNIDQ

SEQ ID NO: 16412 - protein, 34 aa, Artificial sequence
  synthetic peptide
GRLRFKKPQSLTKWSDIWNATKYANSCCQNIDQS

SEQ ID NO: 16413 - protein, 34 aa, Artificial sequence
  synthetic peptide
RLRFKKPQSLTKWSDIWNATKYANSCCQNIDQSF

SEQ ID NO: 16414 - protein, 34 aa, Artificial sequence
  synthetic peptide
LRFKKPQSLTKWSDIWNATKYANSCCQNIDQSFP

SEQ ID NO: 16415 - protein, 34 aa, Artificial sequence
  synthetic peptide
RFKKPQSLTKWSDIWNATKYANSCCQNIDQSFPG

SEQ ID NO: 16416 - protein, 34 aa, Artificial sequence
  synthetic peptide
FKKPQSLTKWSDIWNATKYANSCCQNIDQSFPGF

SEQ ID NO: 16417 - protein, 34 aa, Artificial sequence
  synthetic peptide
KKPQSLTKWSDIWNATKYANSCCQNIDQSFPGFH

SEQ ID NO: 16418 - protein, 34 aa, Artificial sequence
  synthetic peptide
KPQSLTKWSDIWNATKYANSCCQNIDQSFPGFHG

SEQ ID NO: 16419 - protein, 34 aa, Artificial sequence
  synthetic peptide
PQSLTKWSDIWNATKYANSCCQNIDQSFPGFHGS

SEQ ID NO: 16420 - protein, 34 aa, Artificial sequence
  synthetic peptide
QSLTKWSDIWNATKYANSCCQNIDQSFPGFHGSE

SEQ ID NO: 16421 - protein, 34 aa, Artificial sequence
  synthetic peptide
SLTKWSDIWNATKYANSCCQNIDQSFPGFHGSEM

SEQ ID NO: 16422 - protein, 34 aa, Artificial sequence
  synthetic peptide
LTKWSDIWNATKYANSCCQNIDQSFPGFHGSEMW

SEQ ID NO: 16423 - protein, 34 aa, Artificial sequence
  synthetic peptide
TKWSDIWNATKYANSCCQNIDQSFPGFHGSEMWN

SEQ ID NO: 16424 - protein, 34 aa, Artificial sequence
  synthetic peptide
KWSDIWNATKYANSCCQNIDQSFPGFHGSEMWNP

SEQ ID NO: 16425 - protein, 34 aa, Artificial sequence
  synthetic peptide
WSDIWNATKYANSCCQNIDQSFPGFHGSEMWNPN

SEQ ID NO: 16426 - protein, 34 aa, Artificial sequence
  synthetic peptide
SDIWNATKYANSCCQNIDQSFPGFHGSEMWNPNT

SEQ ID NO: 16427 - protein, 34 aa, Artificial sequence
  synthetic peptide
DIWNATKYANSCCQNIDQSFPGFHGSEMWNPNTD

SEQ ID NO: 16428 - protein, 34 aa, Artificial sequence
  synthetic peptide
IWNATKYANSCCQNIDQSFPGFHGSEMWNPNTDL

SEQ ID NO: 16429 - protein, 34 aa, Artificial sequence
  synthetic peptide
WNATKYANSCCQNIDQSFPGFHGSEMWNPNTDLS

SEQ ID NO: 16430 - protein, 34 aa, Artificial sequence
  synthetic peptide
NATKYANSCCQNIDQSFPGFHGSEMWNPNTDLSE

SEQ ID NO: 16431 - protein, 34 aa, Artificial sequence
  synthetic peptide
ATKYANSCCQNIDQSFPGFHGSEMWNPNTDLSED

SEQ ID NO: 16432 - protein, 34 aa, Artificial sequence
  synthetic peptide
TKYANSCCQNIDQSFPGFHGSEMWNPNTDLSEDC

SEQ ID NO: 16433 - protein, 34 aa, Artificial sequence
  synthetic peptide
KYANSCCQNIDQSFPGFHGSEMWNPNTDLSEDCL

SEQ ID NO: 16434 - protein, 34 aa, Artificial sequence
  synthetic peptide
YANSCCQNIDQSFPGFHGSEMWNPNTDLSEDCLY

SEQ ID NO: 16435 - protein, 34 aa, Artificial sequence
  synthetic peptide
ANSCCQNIDQSFPGFHGSEMWNPNTDLSEDCLYL

SEQ ID NO: 16436 - protein, 34 aa, Artificial sequence
  synthetic peptide
NSCCQNIDQSFPGFHGSEMWNPNTDLSEDCLYLN

SEQ ID NO: 16437 - protein, 34 aa, Artificial sequence
  synthetic peptide
SCCQNIDQSFPGFHGSEMWNPNTDLSEDCLYLNV

SEQ ID NO: 16438 - protein, 34 aa, Artificial sequence
  synthetic peptide
CCQNIDQSFPGFHGSEMWNPNTDLSEDCLYLNVW

SEQ ID NO: 16439 - protein, 34 aa, Artificial sequence
  synthetic peptide
CQNIDQSFPGFHGSEMWNPNTDLSEDCLYLNVWI

SEQ ID NO: 16440 - protein, 34 aa, Artificial sequence
  synthetic peptide
QNIDQSFPGFHGSEMWNPNTDLSEDCLYLNVWIP

SEQ ID NO: 16441 - protein, 34 aa, Artificial sequence
  synthetic peptide
NIDQSFPGFHGSEMWNPNTDLSEDCLYLNVWIPA

SEQ ID NO: 16442 - protein, 34 aa, Artificial sequence
  synthetic peptide
IDQSFPGFHGSEMWNPNTDLSEDCLYLNVWIPAP

SEQ ID NO: 16443 - protein, 34 aa, Artificial sequence
  synthetic peptide
DQSFPGFHGSEMWNPNTDLSEDCLYLNVWIPAPK

SEQ ID NO: 16444 - protein, 34 aa, Artificial sequence
  synthetic peptide
QSFPGFHGSEMWNPNTDLSEDCLYLNVWIPAPKP

SEQ ID NO: 16445 - protein, 34 aa, Artificial sequence
  synthetic peptide
SFPGFHGSEMWNPNTDLSEDCLYLNVWIPAPKPK

SEQ ID NO: 16446 - protein, 34 aa, Artificial sequence
  synthetic peptide
FPGFHGSEMWNPNTDLSEDCLYLNVWIPAPKPKN

SEQ ID NO: 16447 - protein, 34 aa, Artificial sequence
  synthetic peptide
PGFHGSEMWNPNTDLSEDCLYLNVWIPAPKPKNA

SEQ ID NO: 16448 - protein, 34 aa, Artificial sequence
  synthetic peptide
GFHGSEMWNPNTDLSEDCLYLNVWIPAPKPKNAT

SEQ ID NO: 16449 - protein, 34 aa, Artificial sequence
  synthetic peptide
FHGSEMWNPNTDLSEDCLYLNVWIPAPKPKNATV

SEQ ID NO: 16450 - protein, 34 aa, Artificial sequence
  synthetic peptide
HGSEMWNPNTDLSEDCLYLNVWIPAPKPKNATVL

SEQ ID NO: 16451 - protein, 34 aa, Artificial sequence
  synthetic peptide
GSEMWNPNTDLSEDCLYLNVWIPAPKPKNATVLI

SEQ ID NO: 16452 - protein, 34 aa, Artificial sequence
  synthetic peptide
SEMWNPNTDLSEDCLYLNVWIPAPKPKNATVLIW

SEQ ID NO: 16453 - protein, 34 aa, Artificial sequence
  synthetic peptide
EMWNPNTDLSEDCLYLNVWIPAPKPKNATVLIWI

SEQ ID NO: 16454 - protein, 34 aa, Artificial sequence
  synthetic peptide
MWNPNTDLSEDCLYLNVWIPAPKPKNATVLIWIY

SEQ ID NO: 16455 - protein, 34 aa, Artificial sequence
  synthetic peptide
WNPNTDLSEDCLYLNVWIPAPKPKNATVLIWIYG

SEQ ID NO: 16456 - protein, 34 aa, Artificial sequence
  synthetic peptide
NPNTDLSEDCLYLNVWIPAPKPKNATVLIWIYGG

SEQ ID NO: 16457 - protein, 34 aa, Artificial sequence
  synthetic peptide
PNTDLSEDCLYLNVWIPAPKPKNATVLIWIYGGG

SEQ ID NO: 16458 - protein, 34 aa, Artificial sequence
  synthetic peptide
NTDLSEDCLYLNVWIPAPKPKNATVLIWIYGGGF

SEQ ID NO: 16459 - protein, 34 aa, Artificial sequence
  synthetic peptide
TDLSEDCLYLNVWIPAPKPKNATVLIWIYGGGFQ

SEQ ID NO: 16460 - protein, 34 aa, Artificial sequence
  synthetic peptide
DLSEDCLYLNVWIPAPKPKNATVLIWIYGGGFQT

SEQ ID NO: 16461 - protein, 34 aa, Artificial sequence
  synthetic peptide
LSEDCLYLNVWIPAPKPKNATVLIWIYGGGFQTG

SEQ ID NO: 16462 - protein, 34 aa, Artificial sequence
  synthetic peptide
SEDCLYLNVWIPAPKPKNATVLIWIYGGGFQTGT

SEQ ID NO: 16463 - protein, 34 aa, Artificial sequence
  synthetic peptide
EDCLYLNVWIPAPKPKNATVLIWIYGGGFQTGTS

SEQ ID NO: 16464 - protein, 34 aa, Artificial sequence
  synthetic peptide
DCLYLNVWIPAPKPKNATVLIWIYGGGFQTGTSS

SEQ ID NO: 16465 - protein, 34 aa, Artificial sequence
  synthetic peptide
CLYLNVWIPAPKPKNATVLIWIYGGGFQTGTSSL

SEQ ID NO: 16466 - protein, 34 aa, Artificial sequence
  synthetic peptide
LYLNVWIPAPKPKNATVLIWIYGGGFQTGTSSLH

SEQ ID NO: 16467 - protein, 34 aa, Artificial sequence
  synthetic peptide
YLNVWIPAPKPKNATVLIWIYGGGFQTGTSSLHV

SEQ ID NO: 16468 - protein, 34 aa, Artificial sequence
  synthetic peptide
LNVWIPAPKPKNATVLIWIYGGGFQTGTSSLHVY

SEQ ID NO: 16469 - protein, 34 aa, Artificial sequence
  synthetic peptide
NVWIPAPKPKNATVLIWIYGGGFQTGTSSLHVYD

SEQ ID NO: 16470 - protein, 34 aa, Artificial sequence
  synthetic peptide
VWIPAPKPKNATVLIWIYGGGFQTGTSSLHVYDG

SEQ ID NO: 16471 - protein, 34 aa, Artificial sequence
  synthetic peptide
WIPAPKPKNATVLIWIYGGGFQTGTSSLHVYDGK

SEQ ID NO: 16472 - protein, 34 aa, Artificial sequence
  synthetic peptide
IPAPKPKNATVLIWIYGGGFQTGTSSLHVYDGKF

SEQ ID NO: 16473 - protein, 34 aa, Artificial sequence
  synthetic peptide
PAPKPKNATVLIWIYGGGFQTGTSSLHVYDGKFL

SEQ ID NO: 16474 - protein, 34 aa, Artificial sequence
  synthetic peptide
APKPKNATVLIWIYGGGFQTGTSSLHVYDGKFLA

SEQ ID NO: 16475 - protein, 34 aa, Artificial sequence
  synthetic peptide
PKPKNATVLIWIYGGGFQTGTSSLHVYDGKFLAR

SEQ ID NO: 16476 - protein, 34 aa, Artificial sequence
  synthetic peptide
KPKNATVLIWIYGGGFQTGTSSLHVYDGKFLARV

SEQ ID NO: 16477 - protein, 34 aa, Artificial sequence
  synthetic peptide
PKNATVLIWIYGGGFQTGTSSLHVYDGKFLARVE

SEQ ID NO: 16478 - protein, 34 aa, Artificial sequence
  synthetic peptide
KNATVLIWIYGGGFQTGTSSLHVYDGKFLARVER

SEQ ID NO: 16479 - protein, 34 aa, Artificial sequence
  synthetic peptide
NATVLIWIYGGGFQTGTSSLHVYDGKFLARVERV

SEQ ID NO: 16480 - protein, 34 aa, Artificial sequence
  synthetic peptide
ATVLIWIYGGGFQTGTSSLHVYDGKFLARVERVI

SEQ ID NO: 16481 - protein, 34 aa, Artificial sequence
  synthetic peptide
TVLIWIYGGGFQTGTSSLHVYDGKFLARVERVIV

SEQ ID NO: 16482 - protein, 34 aa, Artificial sequence
  synthetic peptide
VLIWIYGGGFQTGTSSLHVYDGKFLARVERVIVV

SEQ ID NO: 16483 - protein, 34 aa, Artificial sequence
  synthetic peptide
LIWIYGGGFQTGTSSLHVYDGKFLARVERVIVVS

SEQ ID NO: 16484 - protein, 34 aa, Artificial sequence
  synthetic peptide
IWIYGGGFQTGTSSLHVYDGKFLARVERVIVVSM

SEQ ID NO: 16485 - protein, 34 aa, Artificial sequence
  synthetic peptide
WIYGGGFQTGTSSLHVYDGKFLARVERVIVVSMN

SEQ ID NO: 16486 - protein, 34 aa, Artificial sequence
  synthetic peptide
IYGGGFQTGTSSLHVYDGKFLARVERVIVVSMNY

SEQ ID NO: 16487 - protein, 34 aa, Artificial sequence
  synthetic peptide
YGGGFQTGTSSLHVYDGKFLARVERVIVVSMNYR

SEQ ID NO: 16488 - protein, 34 aa, Artificial sequence
  synthetic peptide
GGGFQTGTSSLHVYDGKFLARVERVIVVSMNYRV

SEQ ID NO: 16489 - protein, 34 aa, Artificial sequence
  synthetic peptide
GGFQTGTSSLHVYDGKFLARVERVIVVSMNYRVG

SEQ ID NO: 16490 - protein, 34 aa, Artificial sequence
  synthetic peptide
GFQTGTSSLHVYDGKFLARVERVIVVSMNYRVGA

SEQ ID NO: 16491 - protein, 34 aa, Artificial sequence
  synthetic peptide
FQTGTSSLHVYDGKFLARVERVIVVSMNYRVGAL

SEQ ID NO: 16492 - protein, 34 aa, Artificial sequence
  synthetic peptide
QTGTSSLHVYDGKFLARVERVIVVSMNYRVGALG

SEQ ID NO: 16493 - protein, 34 aa, Artificial sequence
  synthetic peptide
TGTSSLHVYDGKFLARVERVIVVSMNYRVGALGF

SEQ ID NO: 16494 - protein, 34 aa, Artificial sequence
  synthetic peptide
GTSSLHVYDGKFLARVERVIVVSMNYRVGALGFL

SEQ ID NO: 16495 - protein, 34 aa, Artificial sequence
  synthetic peptide
TSSLHVYDGKFLARVERVIVVSMNYRVGALGFLA

SEQ ID NO: 16496 - protein, 34 aa, Artificial sequence
  synthetic peptide
SSLHVYDGKFLARVERVIVVSMNYRVGALGFLAL

SEQ ID NO: 16497 - protein, 34 aa, Artificial sequence
  synthetic peptide
SLHVYDGKFLARVERVIVVSMNYRVGALGFLALP

SEQ ID NO: 16498 - protein, 34 aa, Artificial sequence
  synthetic peptide
LHVYDGKFLARVERVIVVSMNYRVGALGFLALPG

SEQ ID NO: 16499 - protein, 34 aa, Artificial sequence
  synthetic peptide
HVYDGKFLARVERVIVVSMNYRVGALGFLALPGN

SEQ ID NO: 16500 - protein, 34 aa, Artificial sequence
  synthetic peptide
VYDGKFLARVERVIVVSMNYRVGALGFLALPGNP

SEQ ID NO: 16501 - protein, 34 aa, Artificial sequence
  synthetic peptide
YDGKFLARVERVIVVSMNYRVGALGFLALPGNPE

SEQ ID NO: 16502 - protein, 34 aa, Artificial sequence
  synthetic peptide
DGKFLARVERVIVVSMNYRVGALGFLALPGNPEA

SEQ ID NO: 16503 - protein, 34 aa, Artificial sequence
  synthetic peptide
GKFLARVERVIVVSMNYRVGALGFLALPGNPEAP

SEQ ID NO: 16504 - protein, 34 aa, Artificial sequence
  synthetic peptide
KFLARVERVIVVSMNYRVGALGFLALPGNPEAPG

SEQ ID NO: 16505 - protein, 34 aa, Artificial sequence
  synthetic peptide
FLARVERVIVVSMNYRVGALGFLALPGNPEAPGN

SEQ ID NO: 16506 - protein, 34 aa, Artificial sequence
  synthetic peptide
LARVERVIVVSMNYRVGALGFLALPGNPEAPGNM

SEQ ID NO: 16507 - protein, 34 aa, Artificial sequence
  synthetic peptide
ARVERVIVVSMNYRVGALGFLALPGNPEAPGNMG

SEQ ID NO: 16508 - protein, 34 aa, Artificial sequence
  synthetic peptide
RVERVIVVSMNYRVGALGFLALPGNPEAPGNMGL

SEQ ID NO: 16509 - protein, 34 aa, Artificial sequence
  synthetic peptide
VERVIVVSMNYRVGALGFLALPGNPEAPGNMGLF

SEQ ID NO: 16510 - protein, 34 aa, Artificial sequence
  synthetic peptide
ERVIVVSMNYRVGALGFLALPGNPEAPGNMGLFD

SEQ ID NO: 16511 - protein, 34 aa, Artificial sequence
  synthetic peptide
RVIVVSMNYRVGALGFLALPGNPEAPGNMGLFDQ

SEQ ID NO: 16512 - protein, 34 aa, Artificial sequence
  synthetic peptide
VIVVSMNYRVGALGFLALPGNPEAPGNMGLFDQQ

SEQ ID NO: 16513 - protein, 34 aa, Artificial sequence
  synthetic peptide
IVVSMNYRVGALGFLALPGNPEAPGNMGLFDQQL

SEQ ID NO: 16514 - protein, 34 aa, Artificial sequence
  synthetic peptide
VVSMNYRVGALGFLALPGNPEAPGNMGLFDQQLA

SEQ ID NO: 16515 - protein, 34 aa, Artificial sequence
  synthetic peptide
VSMNYRVGALGFLALPGNPEAPGNMGLFDQQLAL

SEQ ID NO: 16516 - protein, 34 aa, Artificial sequence
  synthetic peptide
SMNYRVGALGFLALPGNPEAPGNMGLFDQQLALQ

SEQ ID NO: 16517 - protein, 34 aa, Artificial sequence
  synthetic peptide
MNYRVGALGFLALPGNPEAPGNMGLFDQQLALQW

SEQ ID NO: 16518 - protein, 34 aa, Artificial sequence
  synthetic peptide
NYRVGALGFLALPGNPEAPGNMGLFDQQLALQWV

SEQ ID NO: 16519 - protein, 34 aa, Artificial sequence
  synthetic peptide
YRVGALGFLALPGNPEAPGNMGLFDQQLALQWVQ

SEQ ID NO: 16520 - protein, 34 aa, Artificial sequence
  synthetic peptide
RVGALGFLALPGNPEAPGNMGLFDQQLALQWVQK

SEQ ID NO: 16521 - protein, 34 aa, Artificial sequence
  synthetic peptide
VGALGFLALPGNPEAPGNMGLFDQQLALQWVQKN

SEQ ID NO: 16522 - protein, 34 aa, Artificial sequence
  synthetic peptide
GALGFLALPGNPEAPGNMGLFDQQLALQWVQKNI

SEQ ID NO: 16523 - protein, 34 aa, Artificial sequence
  synthetic peptide
ALGFLALPGNPEAPGNMGLFDQQLALQWVQKNIA

SEQ ID NO: 16524 - protein, 34 aa, Artificial sequence
  synthetic peptide
LGFLALPGNPEAPGNMGLFDQQLALQWVQKNIAA

SEQ ID NO: 16525 - protein, 34 aa, Artificial sequence
  synthetic peptide
GFLALPGNPEAPGNMGLFDQQLALQWVQKNIAAF

SEQ ID NO: 16526 - protein, 34 aa, Artificial sequence
  synthetic peptide
FLALPGNPEAPGNMGLFDQQLALQWVQKNIAAFG

SEQ ID NO: 16527 - protein, 34 aa, Artificial sequence
  synthetic peptide
LALPGNPEAPGNMGLFDQQLALQWVQKNIAAFGG

SEQ ID NO: 16528 - protein, 34 aa, Artificial sequence
  synthetic peptide
ALPGNPEAPGNMGLFDQQLALQWVQKNIAAFGGN

SEQ ID NO: 16529 - protein, 34 aa, Artificial sequence
  synthetic peptide
LPGNPEAPGNMGLFDQQLALQWVQKNIAAFGGNP

SEQ ID NO: 16530 - protein, 34 aa, Artificial sequence
  synthetic peptide
PGNPEAPGNMGLFDQQLALQWVQKNIAAFGGNPK

SEQ ID NO: 16531 - protein, 34 aa, Artificial sequence
  synthetic peptide
GNPEAPGNMGLFDQQLALQWVQKNIAAFGGNPKS

SEQ ID NO: 16532 - protein, 34 aa, Artificial sequence
  synthetic peptide
NPEAPGNMGLFDQQLALQWVQKNIAAFGGNPKSV

SEQ ID NO: 16533 - protein, 34 aa, Artificial sequence
  synthetic peptide
PEAPGNMGLFDQQLALQWVQKNIAAFGGNPKSVT

SEQ ID NO: 16534 - protein, 34 aa, Artificial sequence
  synthetic peptide
EAPGNMGLFDQQLALQWVQKNIAAFGGNPKSVTL

SEQ ID NO: 16535 - protein, 34 aa, Artificial sequence
  synthetic peptide
APGNMGLFDQQLALQWVQKNIAAFGGNPKSVTLF

SEQ ID NO: 16536 - protein, 34 aa, Artificial sequence
  synthetic peptide
PGNMGLFDQQLALQWVQKNIAAFGGNPKSVTLFG

SEQ ID NO: 16537 - protein, 34 aa, Artificial sequence
  synthetic peptide
GNMGLFDQQLALQWVQKNIAAFGGNPKSVTLFGE

SEQ ID NO: 16538 - protein, 34 aa, Artificial sequence
  synthetic peptide
NMGLFDQQLALQWVQKNIAAFGGNPKSVTLFGES

SEQ ID NO: 16539 - protein, 34 aa, Artificial sequence
  synthetic peptide
MGLFDQQLALQWVQKNIAAFGGNPKSVTLFGESA

SEQ ID NO: 16540 - protein, 34 aa, Artificial sequence
  synthetic peptide
GLFDQQLALQWVQKNIAAFGGNPKSVTLFGESAG

SEQ ID NO: 16541 - protein, 34 aa, Artificial sequence
  synthetic peptide
LFDQQLALQWVQKNIAAFGGNPKSVTLFGESAGA

SEQ ID NO: 16542 - protein, 34 aa, Artificial sequence
  synthetic peptide
FDQQLALQWVQKNIAAFGGNPKSVTLFGESAGAA

SEQ ID NO: 16543 - protein, 34 aa, Artificial sequence
  synthetic peptide
DQQLALQWVQKNIAAFGGNPKSVTLFGESAGAAS

SEQ ID NO: 16544 - protein, 34 aa, Artificial sequence
  synthetic peptide
QQLALQWVQKNIAAFGGNPKSVTLFGESAGAASV

SEQ ID NO: 16545 - protein, 34 aa, Artificial sequence
  synthetic peptide
QLALQWVQKNIAAFGGNPKSVTLFGESAGAASVS

SEQ ID NO: 16546 - protein, 34 aa, Artificial sequence
  synthetic peptide
LALQWVQKNIAAFGGNPKSVTLFGESAGAASVSL

SEQ ID NO: 16547 - protein, 34 aa, Artificial sequence
  synthetic peptide
ALQWVQKNIAAFGGNPKSVTLFGESAGAASVSLH

SEQ ID NO: 16548 - protein, 34 aa, Artificial sequence
  synthetic peptide
LQWVQKNIAAFGGNPKSVTLFGESAGAASVSLHL

SEQ ID NO: 16549 - protein, 34 aa, Artificial sequence
  synthetic peptide
QWVQKNIAAFGGNPKSVTLFGESAGAASVSLHLL

SEQ ID NO: 16550 - protein, 34 aa, Artificial sequence
  synthetic peptide
WVQKNIAAFGGNPKSVTLFGESAGAASVSLHLLS

SEQ ID NO: 16551 - protein, 34 aa, Artificial sequence
  synthetic peptide
VQKNIAAFGGNPKSVTLFGESAGAASVSLHLLSP

SEQ ID NO: 16552 - protein, 34 aa, Artificial sequence
  synthetic peptide
QKNIAAFGGNPKSVTLFGESAGAASVSLHLLSPG

SEQ ID NO: 16553 - protein, 34 aa, Artificial sequence
  synthetic peptide
KNIAAFGGNPKSVTLFGESAGAASVSLHLLSPGS

SEQ ID NO: 16554 - protein, 34 aa, Artificial sequence
  synthetic peptide
NIAAFGGNPKSVTLFGESAGAASVSLHLLSPGSH

SEQ ID NO: 16555 - protein, 34 aa, Artificial sequence
  synthetic peptide
IAAFGGNPKSVTLFGESAGAASVSLHLLSPGSHS

SEQ ID NO: 16556 - protein, 34 aa, Artificial sequence
  synthetic peptide
AAFGGNPKSVTLFGESAGAASVSLHLLSPGSHSL

SEQ ID NO: 16557 - protein, 34 aa, Artificial sequence
  synthetic peptide
AFGGNPKSVTLFGESAGAASVSLHLLSPGSHSLF

SEQ ID NO: 16558 - protein, 34 aa, Artificial sequence
  synthetic peptide
FGGNPKSVTLFGESAGAASVSLHLLSPGSHSLFT

SEQ ID NO: 16559 - protein, 34 aa, Artificial sequence
  synthetic peptide
GGNPKSVTLFGESAGAASVSLHLLSPGSHSLFTR

SEQ ID NO: 16560 - protein, 34 aa, Artificial sequence
  synthetic peptide
GNPKSVTLFGESAGAASVSLHLLSPGSHSLFTRA

SEQ ID NO: 16561 - protein, 34 aa, Artificial sequence
  synthetic peptide
NPKSVTLFGESAGAASVSLHLLSPGSHSLFTRAI

SEQ ID NO: 16562 - protein, 34 aa, Artificial sequence
  synthetic peptide
PKSVTLFGESAGAASVSLHLLSPGSHSLFTRAIL

SEQ ID NO: 16563 - protein, 34 aa, Artificial sequence
  synthetic peptide
KSVTLFGESAGAASVSLHLLSPGSHSLFTRAILQ

SEQ ID NO: 16564 - protein, 34 aa, Artificial sequence
  synthetic peptide
SVTLFGESAGAASVSLHLLSPGSHSLFTRAILQS

SEQ ID NO: 16565 - protein, 34 aa, Artificial sequence
  synthetic peptide
VTLFGESAGAASVSLHLLSPGSHSLFTRAILQSG

SEQ ID NO: 16566 - protein, 34 aa, Artificial sequence
  synthetic peptide
TLFGESAGAASVSLHLLSPGSHSLFTRAILQSGS

SEQ ID NO: 16567 - protein, 34 aa, Artificial sequence
  synthetic peptide
LFGESAGAASVSLHLLSPGSHSLFTRAILQSGSF

SEQ ID NO: 16568 - protein, 34 aa, Artificial sequence
  synthetic peptide
FGESAGAASVSLHLLSPGSHSLFTRAILQSGSFN

SEQ ID NO: 16569 - protein, 34 aa, Artificial sequence
  synthetic peptide
GESAGAASVSLHLLSPGSHSLFTRAILQSGSFNA

SEQ ID NO: 16570 - protein, 34 aa, Artificial sequence
  synthetic peptide
ESAGAASVSLHLLSPGSHSLFTRAILQSGSFNAP

SEQ ID NO: 16571 - protein, 34 aa, Artificial sequence
  synthetic peptide
SAGAASVSLHLLSPGSHSLFTRAILQSGSFNAPW

SEQ ID NO: 16572 - protein, 34 aa, Artificial sequence
  synthetic peptide
AGAASVSLHLLSPGSHSLFTRAILQSGSFNAPWA

SEQ ID NO: 16573 - protein, 34 aa, Artificial sequence
  synthetic peptide
GAASVSLHLLSPGSHSLFTRAILQSGSFNAPWAV

SEQ ID NO: 16574 - protein, 34 aa, Artificial sequence
  synthetic peptide
AASVSLHLLSPGSHSLFTRAILQSGSFNAPWAVT

SEQ ID NO: 16575 - protein, 34 aa, Artificial sequence
  synthetic peptide
ASVSLHLLSPGSHSLFTRAILQSGSFNAPWAVTS

SEQ ID NO: 16576 - protein, 34 aa, Artificial sequence
  synthetic peptide
SVSLHLLSPGSHSLFTRAILQSGSFNAPWAVTSL

SEQ ID NO: 16577 - protein, 34 aa, Artificial sequence
  synthetic peptide
VSLHLLSPGSHSLFTRAILQSGSFNAPWAVTSLY

SEQ ID NO: 16578 - protein, 34 aa, Artificial sequence
  synthetic peptide
SLHLLSPGSHSLFTRAILQSGSFNAPWAVTSLYE

SEQ ID NO: 16579 - protein, 34 aa, Artificial sequence
  synthetic peptide
LHLLSPGSHSLFTRAILQSGSFNAPWAVTSLYEA

SEQ ID NO: 16580 - protein, 34 aa, Artificial sequence
  synthetic peptide
HLLSPGSHSLFTRAILQSGSFNAPWAVTSLYEAR

SEQ ID NO: 16581 - protein, 34 aa, Artificial sequence
  synthetic peptide
LLSPGSHSLFTRAILQSGSFNAPWAVTSLYEARN

SEQ ID NO: 16582 - protein, 34 aa, Artificial sequence
  synthetic peptide
LSPGSHSLFTRAILQSGSFNAPWAVTSLYEARNR

SEQ ID NO: 16583 - protein, 34 aa, Artificial sequence
  synthetic peptide
SPGSHSLFTRAILQSGSFNAPWAVTSLYEARNRT

SEQ ID NO: 16584 - protein, 34 aa, Artificial sequence
  synthetic peptide
PGSHSLFTRAILQSGSFNAPWAVTSLYEARNRTL

SEQ ID NO: 16585 - protein, 34 aa, Artificial sequence
  synthetic peptide
GSHSLFTRAILQSGSFNAPWAVTSLYEARNRTLN

SEQ ID NO: 16586 - protein, 34 aa, Artificial sequence
  synthetic peptide
SHSLFTRAILQSGSFNAPWAVTSLYEARNRTLNL

SEQ ID NO: 16587 - protein, 34 aa, Artificial sequence
  synthetic peptide
HSLFTRAILQSGSFNAPWAVTSLYEARNRTLNLA

SEQ ID NO: 16588 - protein, 34 aa, Artificial sequence
  synthetic peptide
SLFTRAILQSGSFNAPWAVTSLYEARNRTLNLAK

SEQ ID NO: 16589 - protein, 34 aa, Artificial sequence
  synthetic peptide
LFTRAILQSGSFNAPWAVTSLYEARNRTLNLAKL

SEQ ID NO: 16590 - protein, 34 aa, Artificial sequence
  synthetic peptide
FTRAILQSGSFNAPWAVTSLYEARNRTLNLAKLT

SEQ ID NO: 16591 - protein, 34 aa, Artificial sequence
  synthetic peptide
TRAILQSGSFNAPWAVTSLYEARNRTLNLAKLTG

SEQ ID NO: 16592 - protein, 34 aa, Artificial sequence
  synthetic peptide
RAILQSGSFNAPWAVTSLYEARNRTLNLAKLTGC

SEQ ID NO: 16593 - protein, 34 aa, Artificial sequence
  synthetic peptide
AILQSGSFNAPWAVTSLYEARNRTLNLAKLTGCS

SEQ ID NO: 16594 - protein, 34 aa, Artificial sequence
  synthetic peptide
ILQSGSFNAPWAVTSLYEARNRTLNLAKLTGCSR

SEQ ID NO: 16595 - protein, 34 aa, Artificial sequence
  synthetic peptide
LQSGSFNAPWAVTSLYEARNRTLNLAKLTGCSRE

SEQ ID NO: 16596 - protein, 34 aa, Artificial sequence
  synthetic peptide
QSGSFNAPWAVTSLYEARNRTLNLAKLTGCSREN

SEQ ID NO: 16597 - protein, 34 aa, Artificial sequence
  synthetic peptide
SGSFNAPWAVTSLYEARNRTLNLAKLTGCSRENE

SEQ ID NO: 16598 - protein, 34 aa, Artificial sequence
  synthetic peptide
GSFNAPWAVTSLYEARNRTLNLAKLTGCSRENET

SEQ ID NO: 16599 - protein, 34 aa, Artificial sequence
  synthetic peptide
SFNAPWAVTSLYEARNRTLNLAKLTGCSRENETE

SEQ ID NO: 16600 - protein, 34 aa, Artificial sequence
  synthetic peptide
FNAPWAVTSLYEARNRTLNLAKLTGCSRENETEI

SEQ ID NO: 16601 - protein, 34 aa, Artificial sequence
  synthetic peptide
NAPWAVTSLYEARNRTLNLAKLTGCSRENETEII

SEQ ID NO: 16602 - protein, 34 aa, Artificial sequence
  synthetic peptide
APWAVTSLYEARNRTLNLAKLTGCSRENETEIIK

SEQ ID NO: 16603 - protein, 34 aa, Artificial sequence
  synthetic peptide
PWAVTSLYEARNRTLNLAKLTGCSRENETEIIKC

SEQ ID NO: 16604 - protein, 34 aa, Artificial sequence
  synthetic peptide
WAVTSLYEARNRTLNLAKLTGCSRENETEIIKCL

SEQ ID NO: 16605 - protein, 34 aa, Artificial sequence
  synthetic peptide
AVTSLYEARNRTLNLAKLTGCSRENETEIIKCLR

SEQ ID NO: 16606 - protein, 34 aa, Artificial sequence
  synthetic peptide
VTSLYEARNRTLNLAKLTGCSRENETEIIKCLRN

SEQ ID NO: 16607 - protein, 34 aa, Artificial sequence
  synthetic peptide
TSLYEARNRTLNLAKLTGCSRENETEIIKCLRNK

SEQ ID NO: 16608 - protein, 34 aa, Artificial sequence
  synthetic peptide
SLYEARNRTLNLAKLTGCSRENETEIIKCLRNKD

SEQ ID NO: 16609 - protein, 34 aa, Artificial sequence
  synthetic peptide
LYEARNRTLNLAKLTGCSRENETEIIKCLRNKDP

SEQ ID NO: 16610 - protein, 34 aa, Artificial sequence
  synthetic peptide
YEARNRTLNLAKLTGCSRENETEIIKCLRNKDPQ

SEQ ID NO: 16611 - protein, 34 aa, Artificial sequence
  synthetic peptide
EARNRTLNLAKLTGCSRENETEIIKCLRNKDPQE

SEQ ID NO: 16612 - protein, 34 aa, Artificial sequence
  synthetic peptide
ARNRTLNLAKLTGCSRENETEIIKCLRNKDPQEI

SEQ ID NO: 16613 - protein, 34 aa, Artificial sequence
  synthetic peptide
RNRTLNLAKLTGCSRENETEIIKCLRNKDPQEIL

SEQ ID NO: 16614 - protein, 34 aa, Artificial sequence
  synthetic peptide
NRTLNLAKLTGCSRENETEIIKCLRNKDPQEILL

SEQ ID NO: 16615 - protein, 34 aa, Artificial sequence
  synthetic peptide
RTLNLAKLTGCSRENETEIIKCLRNKDPQEILLN

SEQ ID NO: 16616 - protein, 34 aa, Artificial sequence
  synthetic peptide
TLNLAKLTGCSRENETEIIKCLRNKDPQEILLNE

SEQ ID NO: 16617 - protein, 34 aa, Artificial sequence
  synthetic peptide
LNLAKLTGCSRENETEIIKCLRNKDPQEILLNEA

SEQ ID NO: 16618 - protein, 34 aa, Artificial sequence
  synthetic peptide
NLAKLTGCSRENETEIIKCLRNKDPQEILLNEAF

SEQ ID NO: 16619 - protein, 34 aa, Artificial sequence
  synthetic peptide
LAKLTGCSRENETEIIKCLRNKDPQEILLNEAFV

SEQ ID NO: 16620 - protein, 34 aa, Artificial sequence
  synthetic peptide
AKLTGCSRENETEIIKCLRNKDPQEILLNEAFVV

SEQ ID NO: 16621 - protein, 34 aa, Artificial sequence
  synthetic peptide
KLTGCSRENETEIIKCLRNKDPQEILLNEAFVVP

SEQ ID NO: 16622 - protein, 34 aa, Artificial sequence
  synthetic peptide
LTGCSRENETEIIKCLRNKDPQEILLNEAFVVPY

SEQ ID NO: 16623 - protein, 34 aa, Artificial sequence
  synthetic peptide
TGCSRENETEIIKCLRNKDPQEILLNEAFVVPYG

SEQ ID NO: 16624 - protein, 34 aa, Artificial sequence
  synthetic peptide
GCSRENETEIIKCLRNKDPQEILLNEAFVVPYGT

SEQ ID NO: 16625 - protein, 34 aa, Artificial sequence
  synthetic peptide
CSRENETEIIKCLRNKDPQEILLNEAFVVPYGTP

SEQ ID NO: 16626 - protein, 34 aa, Artificial sequence
  synthetic peptide
SRENETEIIKCLRNKDPQEILLNEAFVVPYGTPL

SEQ ID NO: 16627 - protein, 34 aa, Artificial sequence
  synthetic peptide
RENETEIIKCLRNKDPQEILLNEAFVVPYGTPLS

SEQ ID NO: 16628 - protein, 34 aa, Artificial sequence
  synthetic peptide
ENETEIIKCLRNKDPQEILLNEAFVVPYGTPLSV

SEQ ID NO: 16629 - protein, 34 aa, Artificial sequence
  synthetic peptide
NETEIIKCLRNKDPQEILLNEAFVVPYGTPLSVN

SEQ ID NO: 16630 - protein, 34 aa, Artificial sequence
  synthetic peptide
ETEIIKCLRNKDPQEILLNEAFVVPYGTPLSVNF

SEQ ID NO: 16631 - protein, 34 aa, Artificial sequence
  synthetic peptide
TEIIKCLRNKDPQEILLNEAFVVPYGTPLSVNFG

SEQ ID NO: 16632 - protein, 34 aa, Artificial sequence
  synthetic peptide
EIIKCLRNKDPQEILLNEAFVVPYGTPLSVNFGP

SEQ ID NO: 16633 - protein, 34 aa, Artificial sequence
  synthetic peptide
IIKCLRNKDPQEILLNEAFVVPYGTPLSVNFGPT

SEQ ID NO: 16634 - protein, 34 aa, Artificial sequence
  synthetic peptide
IKCLRNKDPQEILLNEAFVVPYGTPLSVNFGPTV

SEQ ID NO: 16635 - protein, 34 aa, Artificial sequence
  synthetic peptide
KCLRNKDPQEILLNEAFVVPYGTPLSVNFGPTVD

SEQ ID NO: 16636 - protein, 34 aa, Artificial sequence
  synthetic peptide
CLRNKDPQEILLNEAFVVPYGTPLSVNFGPTVDG

SEQ ID NO: 16637 - protein, 34 aa, Artificial sequence
  synthetic peptide
LRNKDPQEILLNEAFVVPYGTPLSVNFGPTVDGD

SEQ ID NO: 16638 - protein, 34 aa, Artificial sequence
  synthetic peptide
RNKDPQEILLNEAFVVPYGTPLSVNFGPTVDGDF

SEQ ID NO: 16639 - protein, 34 aa, Artificial sequence
  synthetic peptide
NKDPQEILLNEAFVVPYGTPLSVNFGPTVDGDFL

SEQ ID NO: 16640 - protein, 34 aa, Artificial sequence
  synthetic peptide
KDPQEILLNEAFVVPYGTPLSVNFGPTVDGDFLT

SEQ ID NO: 16641 - protein, 34 aa, Artificial sequence
  synthetic peptide
DPQEILLNEAFVVPYGTPLSVNFGPTVDGDFLTD

SEQ ID NO: 16642 - protein, 34 aa, Artificial sequence
  synthetic peptide
PQEILLNEAFVVPYGTPLSVNFGPTVDGDFLTDM

SEQ ID NO: 16643 - protein, 34 aa, Artificial sequence
  synthetic peptide
QEILLNEAFVVPYGTPLSVNFGPTVDGDFLTDMP

SEQ ID NO: 16644 - protein, 34 aa, Artificial sequence
  synthetic peptide
EILLNEAFVVPYGTPLSVNFGPTVDGDFLTDMPD

SEQ ID NO: 16645 - protein, 34 aa, Artificial sequence
  synthetic peptide
ILLNEAFVVPYGTPLSVNFGPTVDGDFLTDMPDI

SEQ ID NO: 16646 - protein, 34 aa, Artificial sequence
  synthetic peptide
LLNEAFVVPYGTPLSVNFGPTVDGDFLTDMPDIL

SEQ ID NO: 16647 - protein, 34 aa, Artificial sequence
  synthetic peptide
LNEAFVVPYGTPLSVNFGPTVDGDFLTDMPDILL

SEQ ID NO: 16648 - protein, 34 aa, Artificial sequence
  synthetic peptide
NEAFVVPYGTPLSVNFGPTVDGDFLTDMPDILLE

SEQ ID NO: 16649 - protein, 34 aa, Artificial sequence
  synthetic peptide
EAFVVPYGTPLSVNFGPTVDGDFLTDMPDILLEL

SEQ ID NO: 16650 - protein, 34 aa, Artificial sequence
  synthetic peptide
AFVVPYGTPLSVNFGPTVDGDFLTDMPDILLELG

SEQ ID NO: 16651 - protein, 34 aa, Artificial sequence
  synthetic peptide
FVVPYGTPLSVNFGPTVDGDFLTDMPDILLELGQ

SEQ ID NO: 16652 - protein, 34 aa, Artificial sequence
  synthetic peptide
VVPYGTPLSVNFGPTVDGDFLTDMPDILLELGQF

SEQ ID NO: 16653 - protein, 34 aa, Artificial sequence
  synthetic peptide
VPYGTPLSVNFGPTVDGDFLTDMPDILLELGQFK

SEQ ID NO: 16654 - protein, 34 aa, Artificial sequence
  synthetic peptide
PYGTPLSVNFGPTVDGDFLTDMPDILLELGQFKK

SEQ ID NO: 16655 - protein, 34 aa, Artificial sequence
  synthetic peptide
YGTPLSVNFGPTVDGDFLTDMPDILLELGQFKKT

SEQ ID NO: 16656 - protein, 34 aa, Artificial sequence
  synthetic peptide
GTPLSVNFGPTVDGDFLTDMPDILLELGQFKKTQ

SEQ ID NO: 16657 - protein, 34 aa, Artificial sequence
  synthetic peptide
TPLSVNFGPTVDGDFLTDMPDILLELGQFKKTQI

SEQ ID NO: 16658 - protein, 34 aa, Artificial sequence
  synthetic peptide
PLSVNFGPTVDGDFLTDMPDILLELGQFKKTQIL

SEQ ID NO: 16659 - protein, 34 aa, Artificial sequence
  synthetic peptide
LSVNFGPTVDGDFLTDMPDILLELGQFKKTQILV

SEQ ID NO: 16660 - protein, 34 aa, Artificial sequence
  synthetic peptide
SVNFGPTVDGDFLTDMPDILLELGQFKKTQILVG

SEQ ID NO: 16661 - protein, 34 aa, Artificial sequence
  synthetic peptide
VNFGPTVDGDFLTDMPDILLELGQFKKTQILVGV

SEQ ID NO: 16662 - protein, 34 aa, Artificial sequence
  synthetic peptide
NFGPTVDGDFLTDMPDILLELGQFKKTQILVGVN

SEQ ID NO: 16663 - protein, 34 aa, Artificial sequence
  synthetic peptide
FGPTVDGDFLTDMPDILLELGQFKKTQILVGVNK

SEQ ID NO: 16664 - protein, 34 aa, Artificial sequence
  synthetic peptide
GPTVDGDFLTDMPDILLELGQFKKTQILVGVNKD

SEQ ID NO: 16665 - protein, 34 aa, Artificial sequence
  synthetic peptide
PTVDGDFLTDMPDILLELGQFKKTQILVGVNKDE

SEQ ID NO: 16666 - protein, 34 aa, Artificial sequence
  synthetic peptide
TVDGDFLTDMPDILLELGQFKKTQILVGVNKDEG

SEQ ID NO: 16667 - protein, 34 aa, Artificial sequence
  synthetic peptide
VDGDFLTDMPDILLELGQFKKTQILVGVNKDEGT

SEQ ID NO: 16668 - protein, 34 aa, Artificial sequence
  synthetic peptide
DGDFLTDMPDILLELGQFKKTQILVGVNKDEGTA

SEQ ID NO: 16669 - protein, 34 aa, Artificial sequence
  synthetic peptide
GDFLTDMPDILLELGQFKKTQILVGVNKDEGTAF

SEQ ID NO: 16670 - protein, 34 aa, Artificial sequence
  synthetic peptide
DFLTDMPDILLELGQFKKTQILVGVNKDEGTAFL

SEQ ID NO: 16671 - protein, 34 aa, Artificial sequence
  synthetic peptide
FLTDMPDILLELGQFKKTQILVGVNKDEGTAFLV

SEQ ID NO: 16672 - protein, 34 aa, Artificial sequence
  synthetic peptide
LTDMPDILLELGQFKKTQILVGVNKDEGTAFLVY

SEQ ID NO: 16673 - protein, 34 aa, Artificial sequence
  synthetic peptide
TDMPDILLELGQFKKTQILVGVNKDEGTAFLVYG

SEQ ID NO: 16674 - protein, 34 aa, Artificial sequence
  synthetic peptide
DMPDILLELGQFKKTQILVGVNKDEGTAFLVYGA

SEQ ID NO: 16675 - protein, 34 aa, Artificial sequence
  synthetic peptide
MPDILLELGQFKKTQILVGVNKDEGTAFLVYGAP

SEQ ID NO: 16676 - protein, 34 aa, Artificial sequence
  synthetic peptide
PDILLELGQFKKTQILVGVNKDEGTAFLVYGAPG

SEQ ID NO: 16677 - protein, 34 aa, Artificial sequence
  synthetic peptide
DILLELGQFKKTQILVGVNKDEGTAFLVYGAPGF

SEQ ID NO: 16678 - protein, 34 aa, Artificial sequence
  synthetic peptide
ILLELGQFKKTQILVGVNKDEGTAFLVYGAPGFS

SEQ ID NO: 16679 - protein, 34 aa, Artificial sequence
  synthetic peptide
LLELGQFKKTQILVGVNKDEGTAFLVYGAPGFSK

SEQ ID NO: 16680 - protein, 34 aa, Artificial sequence
  synthetic peptide
LELGQFKKTQILVGVNKDEGTAFLVYGAPGFSKD

SEQ ID NO: 16681 - protein, 34 aa, Artificial sequence
  synthetic peptide
ELGQFKKTQILVGVNKDEGTAFLVYGAPGFSKDN

SEQ ID NO: 16682 - protein, 34 aa, Artificial sequence
  synthetic peptide
LGQFKKTQILVGVNKDEGTAFLVYGAPGFSKDNN

SEQ ID NO: 16683 - protein, 34 aa, Artificial sequence
  synthetic peptide
GQFKKTQILVGVNKDEGTAFLVYGAPGFSKDNNS

SEQ ID NO: 16684 - protein, 34 aa, Artificial sequence
  synthetic peptide
QFKKTQILVGVNKDEGTAFLVYGAPGFSKDNNSI

SEQ ID NO: 16685 - protein, 34 aa, Artificial sequence
  synthetic peptide
FKKTQILVGVNKDEGTAFLVYGAPGFSKDNNSII

SEQ ID NO: 16686 - protein, 34 aa, Artificial sequence
  synthetic peptide
KKTQILVGVNKDEGTAFLVYGAPGFSKDNNSIIT

SEQ ID NO: 16687 - protein, 34 aa, Artificial sequence
  synthetic peptide
KTQILVGVNKDEGTAFLVYGAPGFSKDNNSIITR

SEQ ID NO: 16688 - protein, 34 aa, Artificial sequence
  synthetic peptide
TQILVGVNKDEGTAFLVYGAPGFSKDNNSIITRK

SEQ ID NO: 16689 - protein, 34 aa, Artificial sequence
  synthetic peptide
QILVGVNKDEGTAFLVYGAPGFSKDNNSIITRKE

SEQ ID NO: 16690 - protein, 34 aa, Artificial sequence
  synthetic peptide
ILVGVNKDEGTAFLVYGAPGFSKDNNSIITRKEF

SEQ ID NO: 16691 - protein, 34 aa, Artificial sequence
  synthetic peptide
LVGVNKDEGTAFLVYGAPGFSKDNNSIITRKEFQ

SEQ ID NO: 16692 - protein, 34 aa, Artificial sequence
  synthetic peptide
VGVNKDEGTAFLVYGAPGFSKDNNSIITRKEFQE

SEQ ID NO: 16693 - protein, 34 aa, Artificial sequence
  synthetic peptide
GVNKDEGTAFLVYGAPGFSKDNNSIITRKEFQEG

SEQ ID NO: 16694 - protein, 34 aa, Artificial sequence
  synthetic peptide
VNKDEGTAFLVYGAPGFSKDNNSIITRKEFQEGL

SEQ ID NO: 16695 - protein, 34 aa, Artificial sequence
  synthetic peptide
NKDEGTAFLVYGAPGFSKDNNSIITRKEFQEGLK

SEQ ID NO: 16696 - protein, 34 aa, Artificial sequence
  synthetic peptide
KDEGTAFLVYGAPGFSKDNNSIITRKEFQEGLKI

SEQ ID NO: 16697 - protein, 34 aa, Artificial sequence
  synthetic peptide
DEGTAFLVYGAPGFSKDNNSIITRKEFQEGLKIF

SEQ ID NO: 16698 - protein, 34 aa, Artificial sequence
  synthetic peptide
EGTAFLVYGAPGFSKDNNSIITRKEFQEGLKIFF

SEQ ID NO: 16699 - protein, 34 aa, Artificial sequence
  synthetic peptide
GTAFLVYGAPGFSKDNNSIITRKEFQEGLKIFFP

SEQ ID NO: 16700 - protein, 34 aa, Artificial sequence
  synthetic peptide
TAFLVYGAPGFSKDNNSIITRKEFQEGLKIFFPG

SEQ ID NO: 16701 - protein, 34 aa, Artificial sequence
  synthetic peptide
AFLVYGAPGFSKDNNSIITRKEFQEGLKIFFPGV

SEQ ID NO: 16702 - protein, 34 aa, Artificial sequence
  synthetic peptide
FLVYGAPGFSKDNNSIITRKEFQEGLKIFFPGVS

SEQ ID NO: 16703 - protein, 34 aa, Artificial sequence
  synthetic peptide
LVYGAPGFSKDNNSIITRKEFQEGLKIFFPGVSE

SEQ ID NO: 16704 - protein, 34 aa, Artificial sequence
  synthetic peptide
VYGAPGFSKDNNSIITRKEFQEGLKIFFPGVSEF

SEQ ID NO: 16705 - protein, 34 aa, Artificial sequence
  synthetic peptide
YGAPGFSKDNNSIITRKEFQEGLKIFFPGVSEFG

SEQ ID NO: 16706 - protein, 34 aa, Artificial sequence
  synthetic peptide
GAPGFSKDNNSIITRKEFQEGLKIFFPGVSEFGK

SEQ ID NO: 16707 - protein, 34 aa, Artificial sequence
  synthetic peptide
APGFSKDNNSIITRKEFQEGLKIFFPGVSEFGKE

SEQ ID NO: 16708 - protein, 34 aa, Artificial sequence
  synthetic peptide
PGFSKDNNSIITRKEFQEGLKIFFPGVSEFGKES

SEQ ID NO: 16709 - protein, 34 aa, Artificial sequence
  synthetic peptide
GFSKDNNSIITRKEFQEGLKIFFPGVSEFGKESI

SEQ ID NO: 16710 - protein, 34 aa, Artificial sequence
  synthetic peptide
FSKDNNSIITRKEFQEGLKIFFPGVSEFGKESIL

SEQ ID NO: 16711 - protein, 34 aa, Artificial sequence
  synthetic peptide
SKDNNSIITRKEFQEGLKIFFPGVSEFGKESILF

SEQ ID NO: 16712 - protein, 34 aa, Artificial sequence
  synthetic peptide
KDNNSIITRKEFQEGLKIFFPGVSEFGKESILFH

SEQ ID NO: 16713 - protein, 34 aa, Artificial sequence
  synthetic peptide
DNNSIITRKEFQEGLKIFFPGVSEFGKESILFHY

SEQ ID NO: 16714 - protein, 34 aa, Artificial sequence
  synthetic peptide
NNSIITRKEFQEGLKIFFPGVSEFGKESILFHYT

SEQ ID NO: 16715 - protein, 34 aa, Artificial sequence
  synthetic peptide
NSIITRKEFQEGLKIFFPGVSEFGKESILFHYTD

SEQ ID NO: 16716 - protein, 34 aa, Artificial sequence
  synthetic peptide
SIITRKEFQEGLKIFFPGVSEFGKESILFHYTDW

SEQ ID NO: 16717 - protein, 34 aa, Artificial sequence
  synthetic peptide
IITRKEFQEGLKIFFPGVSEFGKESILFHYTDWV

SEQ ID NO: 16718 - protein, 34 aa, Artificial sequence
  synthetic peptide
ITRKEFQEGLKIFFPGVSEFGKESILFHYTDWVD

SEQ ID NO: 16719 - protein, 34 aa, Artificial sequence
  synthetic peptide
TRKEFQEGLKIFFPGVSEFGKESILFHYTDWVDD

SEQ ID NO: 16720 - protein, 34 aa, Artificial sequence
  synthetic peptide
RKEFQEGLKIFFPGVSEFGKESILFHYTDWVDDQ

SEQ ID NO: 16721 - protein, 34 aa, Artificial sequence
  synthetic peptide
KEFQEGLKIFFPGVSEFGKESILFHYTDWVDDQR

SEQ ID NO: 16722 - protein, 34 aa, Artificial sequence
  synthetic peptide
EFQEGLKIFFPGVSEFGKESILFHYTDWVDDQRP

SEQ ID NO: 16723 - protein, 34 aa, Artificial sequence
  synthetic peptide
FQEGLKIFFPGVSEFGKESILFHYTDWVDDQRPE

SEQ ID NO: 16724 - protein, 34 aa, Artificial sequence
  synthetic peptide
QEGLKIFFPGVSEFGKESILFHYTDWVDDQRPEN

SEQ ID NO: 16725 - protein, 34 aa, Artificial sequence
  synthetic peptide
EGLKIFFPGVSEFGKESILFHYTDWVDDQRPENY

SEQ ID NO: 16726 - protein, 34 aa, Artificial sequence
  synthetic peptide
GLKIFFPGVSEFGKESILFHYTDWVDDQRPENYR

SEQ ID NO: 16727 - protein, 34 aa, Artificial sequence
  synthetic peptide
LKIFFPGVSEFGKESILFHYTDWVDDQRPENYRE

SEQ ID NO: 16728 - protein, 34 aa, Artificial sequence
  synthetic peptide
KIFFPGVSEFGKESILFHYTDWVDDQRPENYREA

SEQ ID NO: 16729 - protein, 34 aa, Artificial sequence
  synthetic peptide
IFFPGVSEFGKESILFHYTDWVDDQRPENYREAL

SEQ ID NO: 16730 - protein, 34 aa, Artificial sequence
  synthetic peptide
FFPGVSEFGKESILFHYTDWVDDQRPENYREALG

SEQ ID NO: 16731 - protein, 34 aa, Artificial sequence
  synthetic peptide
FPGVSEFGKESILFHYTDWVDDQRPENYREALGD

SEQ ID NO: 16732 - protein, 34 aa, Artificial sequence
  synthetic peptide
PGVSEFGKESILFHYTDWVDDQRPENYREALGDV

SEQ ID NO: 16733 - protein, 34 aa, Artificial sequence
  synthetic peptide
GVSEFGKESILFHYTDWVDDQRPENYREALGDVV

SEQ ID NO: 16734 - protein, 34 aa, Artificial sequence
  synthetic peptide
VSEFGKESILFHYTDWVDDQRPENYREALGDVVG

SEQ ID NO: 16735 - protein, 34 aa, Artificial sequence
  synthetic peptide
SEFGKESILFHYTDWVDDQRPENYREALGDVVGD

SEQ ID NO: 16736 - protein, 34 aa, Artificial sequence
  synthetic peptide
EFGKESILFHYTDWVDDQRPENYREALGDVVGDY

SEQ ID NO: 16737 - protein, 34 aa, Artificial sequence
  synthetic peptide
FGKESILFHYTDWVDDQRPENYREALGDVVGDYN

SEQ ID NO: 16738 - protein, 34 aa, Artificial sequence
  synthetic peptide
GKESILFHYTDWVDDQRPENYREALGDVVGDYNF

SEQ ID NO: 16739 - protein, 34 aa, Artificial sequence
  synthetic peptide
KESILFHYTDWVDDQRPENYREALGDVVGDYNFI

SEQ ID NO: 16740 - protein, 34 aa, Artificial sequence
  synthetic peptide
ESILFHYTDWVDDQRPENYREALGDVVGDYNFIC

SEQ ID NO: 16741 - protein, 34 aa, Artificial sequence
  synthetic peptide
SILFHYTDWVDDQRPENYREALGDVVGDYNFICP

SEQ ID NO: 16742 - protein, 34 aa, Artificial sequence
  synthetic peptide
ILFHYTDWVDDQRPENYREALGDVVGDYNFICPA

SEQ ID NO: 16743 - protein, 34 aa, Artificial sequence
  synthetic peptide
LFHYTDWVDDQRPENYREALGDVVGDYNFICPAL

SEQ ID NO: 16744 - protein, 34 aa, Artificial sequence
  synthetic peptide
FHYTDWVDDQRPENYREALGDVVGDYNFICPALE

SEQ ID NO: 16745 - protein, 34 aa, Artificial sequence
  synthetic peptide
HYTDWVDDQRPENYREALGDVVGDYNFICPALEF

SEQ ID NO: 16746 - protein, 34 aa, Artificial sequence
  synthetic peptide
YTDWVDDQRPENYREALGDVVGDYNFICPALEFT

SEQ ID NO: 16747 - protein, 34 aa, Artificial sequence
  synthetic peptide
TDWVDDQRPENYREALGDVVGDYNFICPALEFTK

SEQ ID NO: 16748 - protein, 34 aa, Artificial sequence
  synthetic peptide
DWVDDQRPENYREALGDVVGDYNFICPALEFTKK

SEQ ID NO: 16749 - protein, 34 aa, Artificial sequence
  synthetic peptide
WVDDQRPENYREALGDVVGDYNFICPALEFTKKF

SEQ ID NO: 16750 - protein, 34 aa, Artificial sequence
  synthetic peptide
VDDQRPENYREALGDVVGDYNFICPALEFTKKFS

SEQ ID NO: 16751 - protein, 34 aa, Artificial sequence
  synthetic peptide
DDQRPENYREALGDVVGDYNFICPALEFTKKFSE

SEQ ID NO: 16752 - protein, 34 aa, Artificial sequence
  synthetic peptide
DQRPENYREALGDVVGDYNFICPALEFTKKFSEW

SEQ ID NO: 16753 - protein, 34 aa, Artificial sequence
  synthetic peptide
QRPENYREALGDVVGDYNFICPALEFTKKFSEWG

SEQ ID NO: 16754 - protein, 34 aa, Artificial sequence
  synthetic peptide
RPENYREALGDVVGDYNFICPALEFTKKFSEWGN

SEQ ID NO: 16755 - protein, 34 aa, Artificial sequence
  synthetic peptide
PENYREALGDVVGDYNFICPALEFTKKFSEWGNN

SEQ ID NO: 16756 - protein, 34 aa, Artificial sequence
  synthetic peptide
ENYREALGDVVGDYNFICPALEFTKKFSEWGNNA

SEQ ID NO: 16757 - protein, 34 aa, Artificial sequence
  synthetic peptide
NYREALGDVVGDYNFICPALEFTKKFSEWGNNAF

SEQ ID NO: 16758 - protein, 34 aa, Artificial sequence
  synthetic peptide
YREALGDVVGDYNFICPALEFTKKFSEWGNNAFF

SEQ ID NO: 16759 - protein, 34 aa, Artificial sequence
  synthetic peptide
REALGDVVGDYNFICPALEFTKKFSEWGNNAFFY

SEQ ID NO: 16760 - protein, 34 aa, Artificial sequence
  synthetic peptide
EALGDVVGDYNFICPALEFTKKFSEWGNNAFFYY

SEQ ID NO: 16761 - protein, 34 aa, Artificial sequence
  synthetic peptide
ALGDVVGDYNFICPALEFTKKFSEWGNNAFFYYF

SEQ ID NO: 16762 - protein, 34 aa, Artificial sequence
  synthetic peptide
LGDVVGDYNFICPALEFTKKFSEWGNNAFFYYFE

SEQ ID NO: 16763 - protein, 34 aa, Artificial sequence
  synthetic peptide
GDVVGDYNFICPALEFTKKFSEWGNNAFFYYFEH

SEQ ID NO: 16764 - protein, 34 aa, Artificial sequence
  synthetic peptide
DVVGDYNFICPALEFTKKFSEWGNNAFFYYFEHR

SEQ ID NO: 16765 - protein, 34 aa, Artificial sequence
  synthetic peptide
VVGDYNFICPALEFTKKFSEWGNNAFFYYFEHRS

SEQ ID NO: 16766 - protein, 34 aa, Artificial sequence
  synthetic peptide
VGDYNFICPALEFTKKFSEWGNNAFFYYFEHRSS

SEQ ID NO: 16767 - protein, 34 aa, Artificial sequence
  synthetic peptide
GDYNFICPALEFTKKFSEWGNNAFFYYFEHRSSK

SEQ ID NO: 16768 - protein, 34 aa, Artificial sequence
  synthetic peptide
DYNFICPALEFTKKFSEWGNNAFFYYFEHRSSKL

SEQ ID NO: 16769 - protein, 34 aa, Artificial sequence
  synthetic peptide
YNFICPALEFTKKFSEWGNNAFFYYFEHRSSKLP

SEQ ID NO: 16770 - protein, 34 aa, Artificial sequence
  synthetic peptide
NFICPALEFTKKFSEWGNNAFFYYFEHRSSKLPW

SEQ ID NO: 16771 - protein, 34 aa, Artificial sequence
  synthetic peptide
FICPALEFTKKFSEWGNNAFFYYFEHRSSKLPWP

SEQ ID NO: 16772 - protein, 34 aa, Artificial sequence
  synthetic peptide
ICPALEFTKKFSEWGNNAFFYYFEHRSSKLPWPE

SEQ ID NO: 16773 - protein, 34 aa, Artificial sequence
  synthetic peptide
CPALEFTKKFSEWGNNAFFYYFEHRSSKLPWPEW

SEQ ID NO: 16774 - protein, 34 aa, Artificial sequence
  synthetic peptide
PALEFTKKFSEWGNNAFFYYFEHRSSKLPWPEWM

SEQ ID NO: 16775 - protein, 34 aa, Artificial sequence
  synthetic peptide
ALEFTKKFSEWGNNAFFYYFEHRSSKLPWPEWMG

SEQ ID NO: 16776 - protein, 34 aa, Artificial sequence
  synthetic peptide
LEFTKKFSEWGNNAFFYYFEHRSSKLPWPEWMGV

SEQ ID NO: 16777 - protein, 34 aa, Artificial sequence
  synthetic peptide
EFTKKFSEWGNNAFFYYFEHRSSKLPWPEWMGVM

SEQ ID NO: 16778 - protein, 34 aa, Artificial sequence
  synthetic peptide
FTKKFSEWGNNAFFYYFEHRSSKLPWPEWMGVMH

SEQ ID NO: 16779 - protein, 34 aa, Artificial sequence
  synthetic peptide
TKKFSEWGNNAFFYYFEHRSSKLPWPEWMGVMHG

SEQ ID NO: 16780 - protein, 34 aa, Artificial sequence
  synthetic peptide
KKFSEWGNNAFFYYFEHRSSKLPWPEWMGVMHGY

SEQ ID NO: 16781 - protein, 34 aa, Artificial sequence
  synthetic peptide
KFSEWGNNAFFYYFEHRSSKLPWPEWMGVMHGYE

SEQ ID NO: 16782 - protein, 34 aa, Artificial sequence
  synthetic peptide
FSEWGNNAFFYYFEHRSSKLPWPEWMGVMHGYEI

SEQ ID NO: 16783 - protein, 34 aa, Artificial sequence
  synthetic peptide
SEWGNNAFFYYFEHRSSKLPWPEWMGVMHGYEIE

SEQ ID NO: 16784 - protein, 34 aa, Artificial sequence
  synthetic peptide
EWGNNAFFYYFEHRSSKLPWPEWMGVMHGYEIEF

SEQ ID NO: 16785 - protein, 34 aa, Artificial sequence
  synthetic peptide
WGNNAFFYYFEHRSSKLPWPEWMGVMHGYEIEFV

SEQ ID NO: 16786 - protein, 34 aa, Artificial sequence
  synthetic peptide
GNNAFFYYFEHRSSKLPWPEWMGVMHGYEIEFVF

SEQ ID NO: 16787 - protein, 34 aa, Artificial sequence
  synthetic peptide
NNAFFYYFEHRSSKLPWPEWMGVMHGYEIEFVFG

SEQ ID NO: 16788 - protein, 34 aa, Artificial sequence
  synthetic peptide
NAFFYYFEHRSSKLPWPEWMGVMHGYEIEFVFGL

SEQ ID NO: 16789 - protein, 34 aa, Artificial sequence
  synthetic peptide
AFFYYFEHRSSKLPWPEWMGVMHGYEIEFVFGLP

SEQ ID NO: 16790 - protein, 34 aa, Artificial sequence
  synthetic peptide
FFYYFEHRSSKLPWPEWMGVMHGYEIEFVFGLPL

SEQ ID NO: 16791 - protein, 34 aa, Artificial sequence
  synthetic peptide
FYYFEHRSSKLPWPEWMGVMHGYEIEFVFGLPLE

SEQ ID NO: 16792 - protein, 34 aa, Artificial sequence
  synthetic peptide
YYFEHRSSKLPWPEWMGVMHGYEIEFVFGLPLER

SEQ ID NO: 16793 - protein, 34 aa, Artificial sequence
  synthetic peptide
YFEHRSSKLPWPEWMGVMHGYEIEFVFGLPLERR

SEQ ID NO: 16794 - protein, 34 aa, Artificial sequence
  synthetic peptide
FEHRSSKLPWPEWMGVMHGYEIEFVFGLPLERRD

SEQ ID NO: 16795 - protein, 34 aa, Artificial sequence
  synthetic peptide
EHRSSKLPWPEWMGVMHGYEIEFVFGLPLERRDN

SEQ ID NO: 16796 - protein, 34 aa, Artificial sequence
  synthetic peptide
HRSSKLPWPEWMGVMHGYEIEFVFGLPLERRDNY

SEQ ID NO: 16797 - protein, 34 aa, Artificial sequence
  synthetic peptide
RSSKLPWPEWMGVMHGYEIEFVFGLPLERRDNYT

SEQ ID NO: 16798 - protein, 34 aa, Artificial sequence
  synthetic peptide
SSKLPWPEWMGVMHGYEIEFVFGLPLERRDNYTK

SEQ ID NO: 16799 - protein, 34 aa, Artificial sequence
  synthetic peptide
SKLPWPEWMGVMHGYEIEFVFGLPLERRDNYTKA

SEQ ID NO: 16800 - protein, 34 aa, Artificial sequence
  synthetic peptide
KLPWPEWMGVMHGYEIEFVFGLPLERRDNYTKAE

SEQ ID NO: 16801 - protein, 34 aa, Artificial sequence
  synthetic peptide
LPWPEWMGVMHGYEIEFVFGLPLERRDNYTKAEE

SEQ ID NO: 16802 - protein, 34 aa, Artificial sequence
  synthetic peptide
PWPEWMGVMHGYEIEFVFGLPLERRDNYTKAEEI

SEQ ID NO: 16803 - protein, 34 aa, Artificial sequence
  synthetic peptide
WPEWMGVMHGYEIEFVFGLPLERRDNYTKAEEIL

SEQ ID NO: 16804 - protein, 34 aa, Artificial sequence
  synthetic peptide
PEWMGVMHGYEIEFVFGLPLERRDNYTKAEEILS

SEQ ID NO: 16805 - protein, 34 aa, Artificial sequence
  synthetic peptide
EWMGVMHGYEIEFVFGLPLERRDNYTKAEEILSR

SEQ ID NO: 16806 - protein, 34 aa, Artificial sequence
  synthetic peptide
WMGVMHGYEIEFVFGLPLERRDNYTKAEEILSRS

SEQ ID NO: 16807 - protein, 34 aa, Artificial sequence
  synthetic peptide
MGVMHGYEIEFVFGLPLERRDNYTKAEEILSRSI

SEQ ID NO: 16808 - protein, 34 aa, Artificial sequence
  synthetic peptide
GVMHGYEIEFVFGLPLERRDNYTKAEEILSRSIV

SEQ ID NO: 16809 - protein, 34 aa, Artificial sequence
  synthetic peptide
VMHGYEIEFVFGLPLERRDNYTKAEEILSRSIVK

SEQ ID NO: 16810 - protein, 34 aa, Artificial sequence
  synthetic peptide
MHGYEIEFVFGLPLERRDNYTKAEEILSRSIVKR

SEQ ID NO: 16811 - protein, 34 aa, Artificial sequence
  synthetic peptide
HGYEIEFVFGLPLERRDNYTKAEEILSRSIVKRW

SEQ ID NO: 16812 - protein, 34 aa, Artificial sequence
  synthetic peptide
GYEIEFVFGLPLERRDNYTKAEEILSRSIVKRWA

SEQ ID NO: 16813 - protein, 34 aa, Artificial sequence
  synthetic peptide
YEIEFVFGLPLERRDNYTKAEEILSRSIVKRWAN

SEQ ID NO: 16814 - protein, 34 aa, Artificial sequence
  synthetic peptide
EIEFVFGLPLERRDNYTKAEEILSRSIVKRWANF

SEQ ID NO: 16815 - protein, 34 aa, Artificial sequence
  synthetic peptide
IEFVFGLPLERRDNYTKAEEILSRSIVKRWANFA

SEQ ID NO: 16816 - protein, 34 aa, Artificial sequence
  synthetic peptide
EFVFGLPLERRDNYTKAEEILSRSIVKRWANFAK

SEQ ID NO: 16817 - protein, 34 aa, Artificial sequence
  synthetic peptide
FVFGLPLERRDNYTKAEEILSRSIVKRWANFAKY

SEQ ID NO: 16818 - protein, 34 aa, Artificial sequence
  synthetic peptide
VFGLPLERRDNYTKAEEILSRSIVKRWANFAKYG

SEQ ID NO: 16819 - protein, 34 aa, Artificial sequence
  synthetic peptide
FGLPLERRDNYTKAEEILSRSIVKRWANFAKYGN

SEQ ID NO: 16820 - protein, 34 aa, Artificial sequence
  synthetic peptide
GLPLERRDNYTKAEEILSRSIVKRWANFAKYGNP

SEQ ID NO: 16821 - protein, 34 aa, Artificial sequence
  synthetic peptide
LPLERRDNYTKAEEILSRSIVKRWANFAKYGNPN

SEQ ID NO: 16822 - protein, 34 aa, Artificial sequence
  synthetic peptide
PLERRDNYTKAEEILSRSIVKRWANFAKYGNPNE

SEQ ID NO: 16823 - protein, 34 aa, Artificial sequence
  synthetic peptide
LERRDNYTKAEEILSRSIVKRWANFAKYGNPNET

SEQ ID NO: 16824 - protein, 34 aa, Artificial sequence
  synthetic peptide
ERRDNYTKAEEILSRSIVKRWANFAKYGNPNETQ

SEQ ID NO: 16825 - protein, 34 aa, Artificial sequence
  synthetic peptide
RRDNYTKAEEILSRSIVKRWANFAKYGNPNETQN

SEQ ID NO: 16826 - protein, 34 aa, Artificial sequence
  synthetic peptide
RDNYTKAEEILSRSIVKRWANFAKYGNPNETQNN

SEQ ID NO: 16827 - protein, 34 aa, Artificial sequence
  synthetic peptide
DNYTKAEEILSRSIVKRWANFAKYGNPNETQNNS

SEQ ID NO: 16828 - protein, 34 aa, Artificial sequence
  synthetic peptide
NYTKAEEILSRSIVKRWANFAKYGNPNETQNNST

SEQ ID NO: 16829 - protein, 34 aa, Artificial sequence
  synthetic peptide
YTKAEEILSRSIVKRWANFAKYGNPNETQNNSTS

SEQ ID NO: 16830 - protein, 34 aa, Artificial sequence
  synthetic peptide
TKAEEILSRSIVKRWANFAKYGNPNETQNNSTSW

SEQ ID NO: 16831 - protein, 34 aa, Artificial sequence
  synthetic peptide
KAEEILSRSIVKRWANFAKYGNPNETQNNSTSWP

SEQ ID NO: 16832 - protein, 34 aa, Artificial sequence
  synthetic peptide
AEEILSRSIVKRWANFAKYGNPNETQNNSTSWPV

SEQ ID NO: 16833 - protein, 34 aa, Artificial sequence
  synthetic peptide
EEILSRSIVKRWANFAKYGNPNETQNNSTSWPVF

SEQ ID NO: 16834 - protein, 34 aa, Artificial sequence
  synthetic peptide
EILSRSIVKRWANFAKYGNPNETQNNSTSWPVFK

SEQ ID NO: 16835 - protein, 34 aa, Artificial sequence
  synthetic peptide
ILSRSIVKRWANFAKYGNPNETQNNSTSWPVFKS

SEQ ID NO: 16836 - protein, 34 aa, Artificial sequence
  synthetic peptide
LSRSIVKRWANFAKYGNPNETQNNSTSWPVFKST

SEQ ID NO: 16837 - protein, 34 aa, Artificial sequence
  synthetic peptide
SRSIVKRWANFAKYGNPNETQNNSTSWPVFKSTE

SEQ ID NO: 16838 - protein, 34 aa, Artificial sequence
  synthetic peptide
RSIVKRWANFAKYGNPNETQNNSTSWPVFKSTEQ

SEQ ID NO: 16839 - protein, 34 aa, Artificial sequence
  synthetic peptide
SIVKRWANFAKYGNPNETQNNSTSWPVFKSTEQK

SEQ ID NO: 16840 - protein, 34 aa, Artificial sequence
  synthetic peptide
IVKRWANFAKYGNPNETQNNSTSWPVFKSTEQKY

SEQ ID NO: 16841 - protein, 34 aa, Artificial sequence
  synthetic peptide
VKRWANFAKYGNPNETQNNSTSWPVFKSTEQKYL

SEQ ID NO: 16842 - protein, 34 aa, Artificial sequence
  synthetic peptide
KRWANFAKYGNPNETQNNSTSWPVFKSTEQKYLT

SEQ ID NO: 16843 - protein, 34 aa, Artificial sequence
  synthetic peptide
RWANFAKYGNPNETQNNSTSWPVFKSTEQKYLTL

SEQ ID NO: 16844 - protein, 34 aa, Artificial sequence
  synthetic peptide
WANFAKYGNPNETQNNSTSWPVFKSTEQKYLTLN

SEQ ID NO: 16845 - protein, 34 aa, Artificial sequence
  synthetic peptide
ANFAKYGNPNETQNNSTSWPVFKSTEQKYLTLNT

SEQ ID NO: 16846 - protein, 34 aa, Artificial sequence
  synthetic peptide
NFAKYGNPNETQNNSTSWPVFKSTEQKYLTLNTE

SEQ ID NO: 16847 - protein, 34 aa, Artificial sequence
  synthetic peptide
FAKYGNPNETQNNSTSWPVFKSTEQKYLTLNTES

SEQ ID NO: 16848 - protein, 34 aa, Artificial sequence
  synthetic peptide
AKYGNPNETQNNSTSWPVFKSTEQKYLTLNTEST

SEQ ID NO: 16849 - protein, 34 aa, Artificial sequence
  synthetic peptide
KYGNPNETQNNSTSWPVFKSTEQKYLTLNTESTR

SEQ ID NO: 16850 - protein, 34 aa, Artificial sequence
  synthetic peptide
YGNPNETQNNSTSWPVFKSTEQKYLTLNTESTRI

SEQ ID NO: 16851 - protein, 34 aa, Artificial sequence
  synthetic peptide
GNPNETQNNSTSWPVFKSTEQKYLTLNTESTRIM

SEQ ID NO: 16852 - protein, 34 aa, Artificial sequence
  synthetic peptide
NPNETQNNSTSWPVFKSTEQKYLTLNTESTRIMT

SEQ ID NO: 16853 - protein, 34 aa, Artificial sequence
  synthetic peptide
PNETQNNSTSWPVFKSTEQKYLTLNTESTRIMTK

SEQ ID NO: 16854 - protein, 34 aa, Artificial sequence
  synthetic peptide
NETQNNSTSWPVFKSTEQKYLTLNTESTRIMTKL

SEQ ID NO: 16855 - protein, 34 aa, Artificial sequence
  synthetic peptide
ETQNNSTSWPVFKSTEQKYLTLNTESTRIMTKLR

SEQ ID NO: 16856 - protein, 34 aa, Artificial sequence
  synthetic peptide
TQNNSTSWPVFKSTEQKYLTLNTESTRIMTKLRA

SEQ ID NO: 16857 - protein, 34 aa, Artificial sequence
  synthetic peptide
QNNSTSWPVFKSTEQKYLTLNTESTRIMTKLRAQ

SEQ ID NO: 16858 - protein, 34 aa, Artificial sequence
  synthetic peptide
NNSTSWPVFKSTEQKYLTLNTESTRIMTKLRAQQ

SEQ ID NO: 16859 - protein, 34 aa, Artificial sequence
  synthetic peptide
NSTSWPVFKSTEQKYLTLNTESTRIMTKLRAQQC

SEQ ID NO: 16860 - protein, 34 aa, Artificial sequence
  synthetic peptide
STSWPVFKSTEQKYLTLNTESTRIMTKLRAQQCR

SEQ ID NO: 16861 - protein, 34 aa, Artificial sequence
  synthetic peptide
TSWPVFKSTEQKYLTLNTESTRIMTKLRAQQCRF

SEQ ID NO: 16862 - protein, 34 aa, Artificial sequence
  synthetic peptide
SWPVFKSTEQKYLTLNTESTRIMTKLRAQQCRFW

SEQ ID NO: 16863 - protein, 34 aa, Artificial sequence
  synthetic peptide
WPVFKSTEQKYLTLNTESTRIMTKLRAQQCRFWT

SEQ ID NO: 16864 - protein, 34 aa, Artificial sequence
  synthetic peptide
PVFKSTEQKYLTLNTESTRIMTKLRAQQCRFWTS

SEQ ID NO: 16865 - protein, 34 aa, Artificial sequence
  synthetic peptide
VFKSTEQKYLTLNTESTRIMTKLRAQQCRFWTSF

SEQ ID NO: 16866 - protein, 34 aa, Artificial sequence
  synthetic peptide
FKSTEQKYLTLNTESTRIMTKLRAQQCRFWTSFF

SEQ ID NO: 16867 - protein, 34 aa, Artificial sequence
  synthetic peptide
KSTEQKYLTLNTESTRIMTKLRAQQCRFWTSFFP

SEQ ID NO: 16868 - protein, 34 aa, Artificial sequence
  synthetic peptide
STEQKYLTLNTESTRIMTKLRAQQCRFWTSFFPK

SEQ ID NO: 16869 - protein, 34 aa, Artificial sequence
  synthetic peptide
TEQKYLTLNTESTRIMTKLRAQQCRFWTSFFPKV

SEQ ID NO: 16870 - protein, 34 aa, Artificial sequence
  synthetic peptide
EQKYLTLNTESTRIMTKLRAQQCRFWTSFFPKVL

SEQ ID NO: 16871 - protein, 34 aa, Artificial sequence
  synthetic peptide
QKYLTLNTESTRIMTKLRAQQCRFWTSFFPKVLE

SEQ ID NO: 16872 - protein, 34 aa, Artificial sequence
  synthetic peptide
KYLTLNTESTRIMTKLRAQQCRFWTSFFPKVLEM

SEQ ID NO: 16873 - protein, 34 aa, Artificial sequence
  synthetic peptide
YLTLNTESTRIMTKLRAQQCRFWTSFFPKVLEMT

SEQ ID NO: 16874 - protein, 34 aa, Artificial sequence
  synthetic peptide
LTLNTESTRIMTKLRAQQCRFWTSFFPKVLEMTG

SEQ ID NO: 16875 - protein, 34 aa, Artificial sequence
  synthetic peptide
TLNTESTRIMTKLRAQQCRFWTSFFPKVLEMTGN

SEQ ID NO: 16876 - protein, 34 aa, Artificial sequence
  synthetic peptide
LNTESTRIMTKLRAQQCRFWTSFFPKVLEMTGNI

SEQ ID NO: 16877 - protein, 34 aa, Artificial sequence
  synthetic peptide
NTESTRIMTKLRAQQCRFWTSFFPKVLEMTGNID

SEQ ID NO: 16878 - protein, 34 aa, Artificial sequence
  synthetic peptide
TESTRIMTKLRAQQCRFWTSFFPKVLEMTGNIDE

SEQ ID NO: 16879 - protein, 34 aa, Artificial sequence
  synthetic peptide
ESTRIMTKLRAQQCRFWTSFFPKVLEMTGNIDEA

SEQ ID NO: 16880 - protein, 34 aa, Artificial sequence
  synthetic peptide
STRIMTKLRAQQCRFWTSFFPKVLEMTGNIDEAE

SEQ ID NO: 16881 - protein, 34 aa, Artificial sequence
  synthetic peptide
TRIMTKLRAQQCRFWTSFFPKVLEMTGNIDEAEW

SEQ ID NO: 16882 - protein, 34 aa, Artificial sequence
  synthetic peptide
RIMTKLRAQQCRFWTSFFPKVLEMTGNIDEAEWE

SEQ ID NO: 16883 - protein, 34 aa, Artificial sequence
  synthetic peptide
IMTKLRAQQCRFWTSFFPKVLEMTGNIDEAEWEW

SEQ ID NO: 16884 - protein, 34 aa, Artificial sequence
  synthetic peptide
MTKLRAQQCRFWTSFFPKVLEMTGNIDEAEWEWK

SEQ ID NO: 16885 - protein, 34 aa, Artificial sequence
  synthetic peptide
TKLRAQQCRFWTSFFPKVLEMTGNIDEAEWEWKA

SEQ ID NO: 16886 - protein, 34 aa, Artificial sequence
  synthetic peptide
KLRAQQCRFWTSFFPKVLEMTGNIDEAEWEWKAG

SEQ ID NO: 16887 - protein, 34 aa, Artificial sequence
  synthetic peptide
LRAQQCRFWTSFFPKVLEMTGNIDEAEWEWKAGF

SEQ ID NO: 16888 - protein, 34 aa, Artificial sequence
  synthetic peptide
RAQQCRFWTSFFPKVLEMTGNIDEAEWEWKAGFH

SEQ ID NO: 16889 - protein, 34 aa, Artificial sequence
  synthetic peptide
AQQCRFWTSFFPKVLEMTGNIDEAEWEWKAGFHR

SEQ ID NO: 16890 - protein, 34 aa, Artificial sequence
  synthetic peptide
QQCRFWTSFFPKVLEMTGNIDEAEWEWKAGFHRW

SEQ ID NO: 16891 - protein, 34 aa, Artificial sequence
  synthetic peptide
QCRFWTSFFPKVLEMTGNIDEAEWEWKAGFHRWN

SEQ ID NO: 16892 - protein, 34 aa, Artificial sequence
  synthetic peptide
CRFWTSFFPKVLEMTGNIDEAEWEWKAGFHRWNN

SEQ ID NO: 16893 - protein, 34 aa, Artificial sequence
  synthetic peptide
RFWTSFFPKVLEMTGNIDEAEWEWKAGFHRWNNY

SEQ ID NO: 16894 - protein, 34 aa, Artificial sequence
  synthetic peptide
FWTSFFPKVLEMTGNIDEAEWEWKAGFHRWNNYM

SEQ ID NO: 16895 - protein, 34 aa, Artificial sequence
  synthetic peptide
WTSFFPKVLEMTGNIDEAEWEWKAGFHRWNNYMM

SEQ ID NO: 16896 - protein, 34 aa, Artificial sequence
  synthetic peptide
TSFFPKVLEMTGNIDEAEWEWKAGFHRWNNYMMD

SEQ ID NO: 16897 - protein, 34 aa, Artificial sequence
  synthetic peptide
SFFPKVLEMTGNIDEAEWEWKAGFHRWNNYMMDW

SEQ ID NO: 16898 - protein, 34 aa, Artificial sequence
  synthetic peptide
FFPKVLEMTGNIDEAEWEWKAGFHRWNNYMMDWK

SEQ ID NO: 16899 - protein, 34 aa, Artificial sequence
  synthetic peptide
FPKVLEMTGNIDEAEWEWKAGFHRWNNYMMDWKN

SEQ ID NO: 16900 - protein, 34 aa, Artificial sequence
  synthetic peptide
PKVLEMTGNIDEAEWEWKAGFHRWNNYMMDWKNQ

SEQ ID NO: 16901 - protein, 34 aa, Artificial sequence
  synthetic peptide
KVLEMTGNIDEAEWEWKAGFHRWNNYMMDWKNQF

SEQ ID NO: 16902 - protein, 34 aa, Artificial sequence
  synthetic peptide
VLEMTGNIDEAEWEWKAGFHRWNNYMMDWKNQFN

SEQ ID NO: 16903 - protein, 34 aa, Artificial sequence
  synthetic peptide
LEMTGNIDEAEWEWKAGFHRWNNYMMDWKNQFND

SEQ ID NO: 16904 - protein, 34 aa, Artificial sequence
  synthetic peptide
EMTGNIDEAEWEWKAGFHRWNNYMMDWKNQFNDY

SEQ ID NO: 16905 - protein, 34 aa, Artificial sequence
  synthetic peptide
MTGNIDEAEWEWKAGFHRWNNYMMDWKNQFNDYT

SEQ ID NO: 16906 - protein, 34 aa, Artificial sequence
  synthetic peptide
TGNIDEAEWEWKAGFHRWNNYMMDWKNQFNDYTS

SEQ ID NO: 16907 - protein, 34 aa, Artificial sequence
  synthetic peptide
GNIDEAEWEWKAGFHRWNNYMMDWKNQFNDYTSK

SEQ ID NO: 16908 - protein, 34 aa, Artificial sequence
  synthetic peptide
NIDEAEWEWKAGFHRWNNYMMDWKNQFNDYTSKK

SEQ ID NO: 16909 - protein, 34 aa, Artificial sequence
  synthetic peptide
IDEAEWEWKAGFHRWNNYMMDWKNQFNDYTSKKE

SEQ ID NO: 16910 - protein, 34 aa, Artificial sequence
  synthetic peptide
DEAEWEWKAGFHRWNNYMMDWKNQFNDYTSKKES

SEQ ID NO: 16911 - protein, 34 aa, Artificial sequence
  synthetic peptide
EAEWEWKAGFHRWNNYMMDWKNQFNDYTSKKESC

SEQ ID NO: 16912 - protein, 34 aa, Artificial sequence
  synthetic peptide
AEWEWKAGFHRWNNYMMDWKNQFNDYTSKKESCV

SEQ ID NO: 16913 - protein, 34 aa, Artificial sequence
  synthetic peptide
EWEWKAGFHRWNNYMMDWKNQFNDYTSKKESCVG

SEQ ID NO: 16914 - protein, 34 aa, Artificial sequence
  synthetic peptide
WEWKAGFHRWNNYMMDWKNQFNDYTSKKESCVGL

SEQ ID NO: 16915 - protein, 35 aa, Artificial sequence
  synthetic peptide
MHSKVTIICIRFLFWFLLLCMLIGKSHTEDDIIIA

SEQ ID NO: 16916 - protein, 35 aa, Artificial sequence
  synthetic peptide
HSKVTIICIRFLFWFLLLCMLIGKSHTEDDIIIAT

SEQ ID NO: 16917 - protein, 35 aa, Artificial sequence
  synthetic peptide
SKVTIICIRFLFWFLLLCMLIGKSHTEDDIIIATK

SEQ ID NO: 16918 - protein, 35 aa, Artificial sequence
  synthetic peptide
KVTIICIRFLFWFLLLCMLIGKSHTEDDIIIATKN

SEQ ID NO: 16919 - protein, 35 aa, Artificial sequence
  synthetic peptide
VTIICIRFLFWFLLLCMLIGKSHTEDDIIIATKNG

SEQ ID NO: 16920 - protein, 35 aa, Artificial sequence
  synthetic peptide
TIICIRFLFWFLLLCMLIGKSHTEDDIIIATKNGK

SEQ ID NO: 16921 - protein, 35 aa, Artificial sequence
  synthetic peptide
IICIRFLFWFLLLCMLIGKSHTEDDIIIATKNGKV

SEQ ID NO: 16922 - protein, 35 aa, Artificial sequence
  synthetic peptide
ICIRFLFWFLLLCMLIGKSHTEDDIIIATKNGKVR

SEQ ID NO: 16923 - protein, 35 aa, Artificial sequence
  synthetic peptide
CIRFLFWFLLLCMLIGKSHTEDDIIIATKNGKVRG

SEQ ID NO: 16924 - protein, 35 aa, Artificial sequence
  synthetic peptide
IRFLFWFLLLCMLIGKSHTEDDIIIATKNGKVRGM

SEQ ID NO: 16925 - protein, 35 aa, Artificial sequence
  synthetic peptide
RFLFWFLLLCMLIGKSHTEDDIIIATKNGKVRGMN

SEQ ID NO: 16926 - protein, 35 aa, Artificial sequence
  synthetic peptide
FLFWFLLLCMLIGKSHTEDDIIIATKNGKVRGMNL

SEQ ID NO: 16927 - protein, 35 aa, Artificial sequence
  synthetic peptide
LFWFLLLCMLIGKSHTEDDIIIATKNGKVRGMNLT

SEQ ID NO: 16928 - protein, 35 aa, Artificial sequence
  synthetic peptide
FWFLLLCMLIGKSHTEDDIIIATKNGKVRGMNLTV

SEQ ID NO: 16929 - protein, 35 aa, Artificial sequence
  synthetic peptide
WFLLLCMLIGKSHTEDDIIIATKNGKVRGMNLTVF

SEQ ID NO: 16930 - protein, 35 aa, Artificial sequence
  synthetic peptide
FLLLCMLIGKSHTEDDIIIATKNGKVRGMNLTVFG

SEQ ID NO: 16931 - protein, 35 aa, Artificial sequence
  synthetic peptide
LLLCMLIGKSHTEDDIIIATKNGKVRGMNLTVFGG

SEQ ID NO: 16932 - protein, 35 aa, Artificial sequence
  synthetic peptide
LLCMLIGKSHTEDDIIIATKNGKVRGMNLTVFGGT

SEQ ID NO: 16933 - protein, 35 aa, Artificial sequence
  synthetic peptide
LCMLIGKSHTEDDIIIATKNGKVRGMNLTVFGGTV

SEQ ID NO: 16934 - protein, 35 aa, Artificial sequence
  synthetic peptide
CMLIGKSHTEDDIIIATKNGKVRGMNLTVFGGTVT

SEQ ID NO: 16935 - protein, 35 aa, Artificial sequence
  synthetic peptide
MLIGKSHTEDDIIIATKNGKVRGMNLTVFGGTVTA

SEQ ID NO: 16936 - protein, 35 aa, Artificial sequence
  synthetic peptide
LIGKSHTEDDIIIATKNGKVRGMNLTVFGGTVTAF

SEQ ID NO: 16937 - protein, 35 aa, Artificial sequence
  synthetic peptide
IGKSHTEDDIIIATKNGKVRGMNLTVFGGTVTAFL

SEQ ID NO: 16938 - protein, 35 aa, Artificial sequence
  synthetic peptide
GKSHTEDDIIIATKNGKVRGMNLTVFGGTVTAFLG

SEQ ID NO: 16939 - protein, 35 aa, Artificial sequence
  synthetic peptide
KSHTEDDIIIATKNGKVRGMNLTVFGGTVTAFLGI

SEQ ID NO: 16940 - protein, 35 aa, Artificial sequence
  synthetic peptide
SHTEDDIIIATKNGKVRGMNLTVFGGTVTAFLGIP

SEQ ID NO: 16941 - protein, 35 aa, Artificial sequence
  synthetic peptide
HTEDDIIIATKNGKVRGMNLTVFGGTVTAFLGIPY

SEQ ID NO: 16942 - protein, 35 aa, Artificial sequence
  synthetic peptide
TEDDIIIATKNGKVRGMNLTVFGGTVTAFLGIPYA

SEQ ID NO: 16943 - protein, 35 aa, Artificial sequence
  synthetic peptide
EDDIIIATKNGKVRGMNLTVFGGTVTAFLGIPYAQ

SEQ ID NO: 16944 - protein, 35 aa, Artificial sequence
  synthetic peptide
DDIIIATKNGKVRGMNLTVFGGTVTAFLGIPYAQP

SEQ ID NO: 16945 - protein, 35 aa, Artificial sequence
  synthetic peptide
DIIIATKNGKVRGMNLTVFGGTVTAFLGIPYAQPP

SEQ ID NO: 16946 - protein, 35 aa, Artificial sequence
  synthetic peptide
IIIATKNGKVRGMNLTVFGGTVTAFLGIPYAQPPL

SEQ ID NO: 16947 - protein, 35 aa, Artificial sequence
  synthetic peptide
IIATKNGKVRGMNLTVFGGTVTAFLGIPYAQPPLG

SEQ ID NO: 16948 - protein, 35 aa, Artificial sequence
  synthetic peptide
IATKNGKVRGMNLTVFGGTVTAFLGIPYAQPPLGR

SEQ ID NO: 16949 - protein, 35 aa, Artificial sequence
  synthetic peptide
ATKNGKVRGMNLTVFGGTVTAFLGIPYAQPPLGRL

SEQ ID NO: 16950 - protein, 35 aa, Artificial sequence
  synthetic peptide
TKNGKVRGMNLTVFGGTVTAFLGIPYAQPPLGRLR

SEQ ID NO: 16951 - protein, 35 aa, Artificial sequence
  synthetic peptide
KNGKVRGMNLTVFGGTVTAFLGIPYAQPPLGRLRF

SEQ ID NO: 16952 - protein, 35 aa, Artificial sequence
  synthetic peptide
NGKVRGMNLTVFGGTVTAFLGIPYAQPPLGRLRFK

SEQ ID NO: 16953 - protein, 35 aa, Artificial sequence
  synthetic peptide
GKVRGMNLTVFGGTVTAFLGIPYAQPPLGRLRFKK

SEQ ID NO: 16954 - protein, 35 aa, Artificial sequence
  synthetic peptide
KVRGMNLTVFGGTVTAFLGIPYAQPPLGRLRFKKP

SEQ ID NO: 16955 - protein, 35 aa, Artificial sequence
  synthetic peptide
VRGMNLTVFGGTVTAFLGIPYAQPPLGRLRFKKPQ

SEQ ID NO: 16956 - protein, 35 aa, Artificial sequence
  synthetic peptide
RGMNLTVFGGTVTAFLGIPYAQPPLGRLRFKKPQS

SEQ ID NO: 16957 - protein, 35 aa, Artificial sequence
  synthetic peptide
GMNLTVFGGTVTAFLGIPYAQPPLGRLRFKKPQSL

SEQ ID NO: 16958 - protein, 35 aa, Artificial sequence
  synthetic peptide
MNLTVFGGTVTAFLGIPYAQPPLGRLRFKKPQSLT

SEQ ID NO: 16959 - protein, 35 aa, Artificial sequence
  synthetic peptide
NLTVFGGTVTAFLGIPYAQPPLGRLRFKKPQSLTK

SEQ ID NO: 16960 - protein, 35 aa, Artificial sequence
  synthetic peptide
LTVFGGTVTAFLGIPYAQPPLGRLRFKKPQSLTKW

SEQ ID NO: 16961 - protein, 35 aa, Artificial sequence
  synthetic peptide
TVFGGTVTAFLGIPYAQPPLGRLRFKKPQSLTKWS

SEQ ID NO: 16962 - protein, 35 aa, Artificial sequence
  synthetic peptide
VFGGTVTAFLGIPYAQPPLGRLRFKKPQSLTKWSD

SEQ ID NO: 16963 - protein, 35 aa, Artificial sequence
  synthetic peptide
FGGTVTAFLGIPYAQPPLGRLRFKKPQSLTKWSDI

SEQ ID NO: 16964 - protein, 35 aa, Artificial sequence
  synthetic peptide
GGTVTAFLGIPYAQPPLGRLRFKKPQSLTKWSDIW

SEQ ID NO: 16965 - protein, 35 aa, Artificial sequence
  synthetic peptide
GTVTAFLGIPYAQPPLGRLRFKKPQSLTKWSDIWN

SEQ ID NO: 16966 - protein, 35 aa, Artificial sequence
  synthetic peptide
TVTAFLGIPYAQPPLGRLRFKKPQSLTKWSDIWNA

SEQ ID NO: 16967 - protein, 35 aa, Artificial sequence
  synthetic peptide
VTAFLGIPYAQPPLGRLRFKKPQSLTKWSDIWNAT

SEQ ID NO: 16968 - protein, 35 aa, Artificial sequence
  synthetic peptide
TAFLGIPYAQPPLGRLRFKKPQSLTKWSDIWNATK

SEQ ID NO: 16969 - protein, 35 aa, Artificial sequence
  synthetic peptide
AFLGIPYAQPPLGRLRFKKPQSLTKWSDIWNATKY

SEQ ID NO: 16970 - protein, 35 aa, Artificial sequence
  synthetic peptide
FLGIPYAQPPLGRLRFKKPQSLTKWSDIWNATKYA

SEQ ID NO: 16971 - protein, 35 aa, Artificial sequence
  synthetic peptide
LGIPYAQPPLGRLRFKKPQSLTKWSDIWNATKYAN

SEQ ID NO: 16972 - protein, 35 aa, Artificial sequence
  synthetic peptide
GIPYAQPPLGRLRFKKPQSLTKWSDIWNATKYANS

SEQ ID NO: 16973 - protein, 35 aa, Artificial sequence
  synthetic peptide
IPYAQPPLGRLRFKKPQSLTKWSDIWNATKYANSC

SEQ ID NO: 16974 - protein, 35 aa, Artificial sequence
  synthetic peptide
PYAQPPLGRLRFKKPQSLTKWSDIWNATKYANSCC

SEQ ID NO: 16975 - protein, 35 aa, Artificial sequence
  synthetic peptide
YAQPPLGRLRFKKPQSLTKWSDIWNATKYANSCCQ

SEQ ID NO: 16976 - protein, 35 aa, Artificial sequence
  synthetic peptide
AQPPLGRLRFKKPQSLTKWSDIWNATKYANSCCQN

SEQ ID NO: 16977 - protein, 35 aa, Artificial sequence
  synthetic peptide
QPPLGRLRFKKPQSLTKWSDIWNATKYANSCCQNI

SEQ ID NO: 16978 - protein, 35 aa, Artificial sequence
  synthetic peptide
PPLGRLRFKKPQSLTKWSDIWNATKYANSCCQNID

SEQ ID NO: 16979 - protein, 35 aa, Artificial sequence
  synthetic peptide
PLGRLRFKKPQSLTKWSDIWNATKYANSCCQNIDQ

SEQ ID NO: 16980 - protein, 35 aa, Artificial sequence
  synthetic peptide
LGRLRFKKPQSLTKWSDIWNATKYANSCCQNIDQS

SEQ ID NO: 16981 - protein, 35 aa, Artificial sequence
  synthetic peptide
GRLRFKKPQSLTKWSDIWNATKYANSCCQNIDQSF

SEQ ID NO: 16982 - protein, 35 aa, Artificial sequence
  synthetic peptide
RLRFKKPQSLTKWSDIWNATKYANSCCQNIDQSFP

SEQ ID NO: 16983 - protein, 35 aa, Artificial sequence
  synthetic peptide
LRFKKPQSLTKWSDIWNATKYANSCCQNIDQSFPG

SEQ ID NO: 16984 - protein, 35 aa, Artificial sequence
  synthetic peptide
RFKKPQSLTKWSDIWNATKYANSCCQNIDQSFPGF

SEQ ID NO: 16985 - protein, 35 aa, Artificial sequence
  synthetic peptide
FKKPQSLTKWSDIWNATKYANSCCQNIDQSFPGFH

SEQ ID NO: 16986 - protein, 35 aa, Artificial sequence
  synthetic peptide
KKPQSLTKWSDIWNATKYANSCCQNIDQSFPGFHG

SEQ ID NO: 16987 - protein, 35 aa, Artificial sequence
  synthetic peptide
KPQSLTKWSDIWNATKYANSCCQNIDQSFPGFHGS

SEQ ID NO: 16988 - protein, 35 aa, Artificial sequence
  synthetic peptide
PQSLTKWSDIWNATKYANSCCQNIDQSFPGFHGSE

SEQ ID NO: 16989 - protein, 35 aa, Artificial sequence
  synthetic peptide
QSLTKWSDIWNATKYANSCCQNIDQSFPGFHGSEM

SEQ ID NO: 16990 - protein, 35 aa, Artificial sequence
  synthetic peptide
SLTKWSDIWNATKYANSCCQNIDQSFPGFHGSEMW

SEQ ID NO: 16991 - protein, 35 aa, Artificial sequence
  synthetic peptide
LTKWSDIWNATKYANSCCQNIDQSFPGFHGSEMWN

SEQ ID NO: 16992 - protein, 35 aa, Artificial sequence
  synthetic peptide
TKWSDIWNATKYANSCCQNIDQSFPGFHGSEMWNP

SEQ ID NO: 16993 - protein, 35 aa, Artificial sequence
  synthetic peptide
KWSDIWNATKYANSCCQNIDQSFPGFHGSEMWNPN

SEQ ID NO: 16994 - protein, 35 aa, Artificial sequence
  synthetic peptide
WSDIWNATKYANSCCQNIDQSFPGFHGSEMWNPNT

SEQ ID NO: 16995 - protein, 35 aa, Artificial sequence
  synthetic peptide
SDIWNATKYANSCCQNIDQSFPGFHGSEMWNPNTD

SEQ ID NO: 16996 - protein, 35 aa, Artificial sequence
  synthetic peptide
DIWNATKYANSCCQNIDQSFPGFHGSEMWNPNTDL

SEQ ID NO: 16997 - protein, 35 aa, Artificial sequence
  synthetic peptide
IWNATKYANSCCQNIDQSFPGFHGSEMWNPNTDLS

SEQ ID NO: 16998 - protein, 35 aa, Artificial sequence
  synthetic peptide
WNATKYANSCCQNIDQSFPGFHGSEMWNPNTDLSE

SEQ ID NO: 16999 - protein, 35 aa, Artificial sequence
  synthetic peptide
NATKYANSCCQNIDQSFPGFHGSEMWNPNTDLSED

SEQ ID NO: 17000 - protein, 35 aa, Artificial sequence
  synthetic peptide
ATKYANSCCQNIDQSFPGFHGSEMWNPNTDLSEDC

SEQ ID NO: 17001 - protein, 35 aa, Artificial sequence
  synthetic peptide
TKYANSCCQNIDQSFPGFHGSEMWNPNTDLSEDCL

SEQ ID NO: 17002 - protein, 35 aa, Artificial sequence
  synthetic peptide
KYANSCCQNIDQSFPGFHGSEMWNPNTDLSEDCLY

SEQ ID NO: 17003 - protein, 35 aa, Artificial sequence
  synthetic peptide
YANSCCQNIDQSFPGFHGSEMWNPNTDLSEDCLYL

SEQ ID NO: 17004 - protein, 35 aa, Artificial sequence
  synthetic peptide
ANSCCQNIDQSFPGFHGSEMWNPNTDLSEDCLYLN

SEQ ID NO: 17005 - protein, 35 aa, Artificial sequence
  synthetic peptide
NSCCQNIDQSFPGFHGSEMWNPNTDLSEDCLYLNV

SEQ ID NO: 17006 - protein, 35 aa, Artificial sequence
  synthetic peptide
SCCQNIDQSFPGFHGSEMWNPNTDLSEDCLYLNVW

SEQ ID NO: 17007 - protein, 35 aa, Artificial sequence
  synthetic peptide
CCQNIDQSFPGFHGSEMWNPNTDLSEDCLYLNVWI

SEQ ID NO: 17008 - protein, 35 aa, Artificial sequence
  synthetic peptide
CQNIDQSFPGFHGSEMWNPNTDLSEDCLYLNVWIP

SEQ ID NO: 17009 - protein, 35 aa, Artificial sequence
  synthetic peptide
QNIDQSFPGFHGSEMWNPNTDLSEDCLYLNVWIPA

SEQ ID NO: 17010 - protein, 35 aa, Artificial sequence
  synthetic peptide
NIDQSFPGFHGSEMWNPNTDLSEDCLYLNVWIPAP

SEQ ID NO: 17011 - protein, 35 aa, Artificial sequence
  synthetic peptide
IDQSFPGFHGSEMWNPNTDLSEDCLYLNVWIPAPK

SEQ ID NO: 17012 - protein, 35 aa, Artificial sequence
  synthetic peptide
DQSFPGFHGSEMWNPNTDLSEDCLYLNVWIPAPKP

SEQ ID NO: 17013 - protein, 35 aa, Artificial sequence
  synthetic peptide
QSFPGFHGSEMWNPNTDLSEDCLYLNVWIPAPKPK

SEQ ID NO: 17014 - protein, 35 aa, Artificial sequence
  synthetic peptide
SFPGFHGSEMWNPNTDLSEDCLYLNVWIPAPKPKN

SEQ ID NO: 17015 - protein, 35 aa, Artificial sequence
  synthetic peptide
FPGFHGSEMWNPNTDLSEDCLYLNVWIPAPKPKNA

SEQ ID NO: 17016 - protein, 35 aa, Artificial sequence
  synthetic peptide
PGFHGSEMWNPNTDLSEDCLYLNVWIPAPKPKNAT

SEQ ID NO: 17017 - protein, 35 aa, Artificial sequence
  synthetic peptide
GFHGSEMWNPNTDLSEDCLYLNVWIPAPKPKNATV

SEQ ID NO: 17018 - protein, 35 aa, Artificial sequence
  synthetic peptide
FHGSEMWNPNTDLSEDCLYLNVWIPAPKPKNATVL

SEQ ID NO: 17019 - protein, 35 aa, Artificial sequence
  synthetic peptide
HGSEMWNPNTDLSEDCLYLNVWIPAPKPKNATVLI

SEQ ID NO: 17020 - protein, 35 aa, Artificial sequence
  synthetic peptide
GSEMWNPNTDLSEDCLYLNVWIPAPKPKNATVLIW

SEQ ID NO: 17021 - protein, 35 aa, Artificial sequence
  synthetic peptide
SEMWNPNTDLSEDCLYLNVWIPAPKPKNATVLIWI

SEQ ID NO: 17022 - protein, 35 aa, Artificial sequence
  synthetic peptide
EMWNPNTDLSEDCLYLNVWIPAPKPKNATVLIWIY

SEQ ID NO: 17023 - protein, 35 aa, Artificial sequence
  synthetic peptide
MWNPNTDLSEDCLYLNVWIPAPKPKNATVLIWIYG

SEQ ID NO: 17024 - protein, 35 aa, Artificial sequence
  synthetic peptide
WNPNTDLSEDCLYLNVWIPAPKPKNATVLIWIYGG

SEQ ID NO: 17025 - protein, 35 aa, Artificial sequence
  synthetic peptide
NPNTDLSEDCLYLNVWIPAPKPKNATVLIWIYGGG

SEQ ID NO: 17026 - protein, 35 aa, Artificial sequence
  synthetic peptide
PNTDLSEDCLYLNVWIPAPKPKNATVLIWIYGGGF

SEQ ID NO: 17027 - protein, 35 aa, Artificial sequence
  synthetic peptide
NTDLSEDCLYLNVWIPAPKPKNATVLIWIYGGGFQ

SEQ ID NO: 17028 - protein, 35 aa, Artificial sequence
  synthetic peptide
TDLSEDCLYLNVWIPAPKPKNATVLIWIYGGGFQT

SEQ ID NO: 17029 - protein, 35 aa, Artificial sequence
  synthetic peptide
DLSEDCLYLNVWIPAPKPKNATVLIWIYGGGFQTG

SEQ ID NO: 17030 - protein, 35 aa, Artificial sequence
  synthetic peptide
LSEDCLYLNVWIPAPKPKNATVLIWIYGGGFQTGT

SEQ ID NO: 17031 - protein, 35 aa, Artificial sequence
  synthetic peptide
SEDCLYLNVWIPAPKPKNATVLIWIYGGGFQTGTS

SEQ ID NO: 17032 - protein, 35 aa, Artificial sequence
  synthetic peptide
EDCLYLNVWIPAPKPKNATVLIWIYGGGFQTGTSS

SEQ ID NO: 17033 - protein, 35 aa, Artificial sequence
  synthetic peptide
DCLYLNVWIPAPKPKNATVLIWIYGGGFQTGTSSL

SEQ ID NO: 17034 - protein, 35 aa, Artificial sequence
  synthetic peptide
CLYLNVWIPAPKPKNATVLIWIYGGGFQTGTSSLH

SEQ ID NO: 17035 - protein, 35 aa, Artificial sequence
  synthetic peptide
LYLNVWIPAPKPKNATVLIWIYGGGFQTGTSSLHV

SEQ ID NO: 17036 - protein, 35 aa, Artificial sequence
  synthetic peptide
YLNVWIPAPKPKNATVLIWIYGGGFQTGTSSLHVY

SEQ ID NO: 17037 - protein, 35 aa, Artificial sequence
  synthetic peptide
LNVWIPAPKPKNATVLIWIYGGGFQTGTSSLHVYD

SEQ ID NO: 17038 - protein, 35 aa, Artificial sequence
  synthetic peptide
NVWIPAPKPKNATVLIWIYGGGFQTGTSSLHVYDG

SEQ ID NO: 17039 - protein, 35 aa, Artificial sequence
  synthetic peptide
VWIPAPKPKNATVLIWIYGGGFQTGTSSLHVYDGK

SEQ ID NO: 17040 - protein, 35 aa, Artificial sequence
  synthetic peptide
WIPAPKPKNATVLIWIYGGGFQTGTSSLHVYDGKF

SEQ ID NO: 17041 - protein, 35 aa, Artificial sequence
  synthetic peptide
IPAPKPKNATVLIWIYGGGFQTGTSSLHVYDGKFL

SEQ ID NO: 17042 - protein, 35 aa, Artificial sequence
  synthetic peptide
PAPKPKNATVLIWIYGGGFQTGTSSLHVYDGKFLA

SEQ ID NO: 17043 - protein, 35 aa, Artificial sequence
  synthetic peptide
APKPKNATVLIWIYGGGFQTGTSSLHVYDGKFLAR

SEQ ID NO: 17044 - protein, 35 aa, Artificial sequence
  synthetic peptide
PKPKNATVLIWIYGGGFQTGTSSLHVYDGKFLARV

SEQ ID NO: 17045 - protein, 35 aa, Artificial sequence
  synthetic peptide
KPKNATVLIWIYGGGFQTGTSSLHVYDGKFLARVE

SEQ ID NO: 17046 - protein, 35 aa, Artificial sequence
  synthetic peptide
PKNATVLIWIYGGGFQTGTSSLHVYDGKFLARVER

SEQ ID NO: 17047 - protein, 35 aa, Artificial sequence
  synthetic peptide
KNATVLIWIYGGGFQTGTSSLHVYDGKFLARVERV

SEQ ID NO: 17048 - protein, 35 aa, Artificial sequence
  synthetic peptide
NATVLIWIYGGGFQTGTSSLHVYDGKFLARVERVI

SEQ ID NO: 17049 - protein, 35 aa, Artificial sequence
  synthetic peptide
ATVLIWIYGGGFQTGTSSLHVYDGKFLARVERVIV

SEQ ID NO: 17050 - protein, 35 aa, Artificial sequence
  synthetic peptide
TVLIWIYGGGFQTGTSSLHVYDGKFLARVERVIVV

SEQ ID NO: 17051 - protein, 35 aa, Artificial sequence
  synthetic peptide
VLIWIYGGGFQTGTSSLHVYDGKFLARVERVIVVS

SEQ ID NO: 17052 - protein, 35 aa, Artificial sequence
  synthetic peptide
LIWIYGGGFQTGTSSLHVYDGKFLARVERVIVVSM

SEQ ID NO: 17053 - protein, 35 aa, Artificial sequence
  synthetic peptide
IWIYGGGFQTGTSSLHVYDGKFLARVERVIVVSMN

SEQ ID NO: 17054 - protein, 35 aa, Artificial sequence
  synthetic peptide
WIYGGGFQTGTSSLHVYDGKFLARVERVIVVSMNY

SEQ ID NO: 17055 - protein, 35 aa, Artificial sequence
  synthetic peptide
IYGGGFQTGTSSLHVYDGKFLARVERVIVVSMNYR

SEQ ID NO: 17056 - protein, 35 aa, Artificial sequence
  synthetic peptide
YGGGFQTGTSSLHVYDGKFLARVERVIVVSMNYRV

SEQ ID NO: 17057 - protein, 35 aa, Artificial sequence
  synthetic peptide
GGGFQTGTSSLHVYDGKFLARVERVIVVSMNYRVG

SEQ ID NO: 17058 - protein, 35 aa, Artificial sequence
  synthetic peptide
GGFQTGTSSLHVYDGKFLARVERVIVVSMNYRVGA

SEQ ID NO: 17059 - protein, 35 aa, Artificial sequence
  synthetic peptide
GFQTGTSSLHVYDGKFLARVERVIVVSMNYRVGAL

SEQ ID NO: 17060 - protein, 35 aa, Artificial sequence
  synthetic peptide
FQTGTSSLHVYDGKFLARVERVIVVSMNYRVGALG

SEQ ID NO: 17061 - protein, 35 aa, Artificial sequence
  synthetic peptide
QTGTSSLHVYDGKFLARVERVIVVSMNYRVGALGF

SEQ ID NO: 17062 - protein, 35 aa, Artificial sequence
  synthetic peptide
TGTSSLHVYDGKFLARVERVIVVSMNYRVGALGFL

SEQ ID NO: 17063 - protein, 35 aa, Artificial sequence
  synthetic peptide
GTSSLHVYDGKFLARVERVIVVSMNYRVGALGFLA

SEQ ID NO: 17064 - protein, 35 aa, Artificial sequence
  synthetic peptide
TSSLHVYDGKFLARVERVIVVSMNYRVGALGFLAL

SEQ ID NO: 17065 - protein, 35 aa, Artificial sequence
  synthetic peptide
SSLHVYDGKFLARVERVIVVSMNYRVGALGFLALP

SEQ ID NO: 17066 - protein, 35 aa, Artificial sequence
  synthetic peptide
SLHVYDGKFLARVERVIVVSMNYRVGALGFLALPG

SEQ ID NO: 17067 - protein, 35 aa, Artificial sequence
  synthetic peptide
LHVYDGKFLARVERVIVVSMNYRVGALGFLALPGN

SEQ ID NO: 17068 - protein, 35 aa, Artificial sequence
  synthetic peptide
HVYDGKFLARVERVIVVSMNYRVGALGFLALPGNP

SEQ ID NO: 17069 - protein, 35 aa, Artificial sequence
  synthetic peptide
VYDGKFLARVERVIVVSMNYRVGALGFLALPGNPE

SEQ ID NO: 17070 - protein, 35 aa, Artificial sequence
  synthetic peptide
YDGKFLARVERVIVVSMNYRVGALGFLALPGNPEA

SEQ ID NO: 17071 - protein, 35 aa, Artificial sequence
  synthetic peptide
DGKFLARVERVIVVSMNYRVGALGFLALPGNPEAP

SEQ ID NO: 17072 - protein, 35 aa, Artificial sequence
  synthetic peptide
GKFLARVERVIVVSMNYRVGALGFLALPGNPEAPG

SEQ ID NO: 17073 - protein, 35 aa, Artificial sequence
  synthetic peptide
KFLARVERVIVVSMNYRVGALGFLALPGNPEAPGN

SEQ ID NO: 17074 - protein, 35 aa, Artificial sequence
  synthetic peptide
FLARVERVIVVSMNYRVGALGFLALPGNPEAPGNM

SEQ ID NO: 17075 - protein, 35 aa, Artificial sequence
  synthetic peptide
LARVERVIVVSMNYRVGALGFLALPGNPEAPGNMG

SEQ ID NO: 17076 - protein, 35 aa, Artificial sequence
  synthetic peptide
ARVERVIVVSMNYRVGALGFLALPGNPEAPGNMGL

SEQ ID NO: 17077 - protein, 35 aa, Artificial sequence
  synthetic peptide
RVERVIVVSMNYRVGALGFLALPGNPEAPGNMGLF

SEQ ID NO: 17078 - protein, 35 aa, Artificial sequence
  synthetic peptide
VERVIVVSMNYRVGALGFLALPGNPEAPGNMGLFD

SEQ ID NO: 17079 - protein, 35 aa, Artificial sequence
  synthetic peptide
ERVIVVSMNYRVGALGFLALPGNPEAPGNMGLFDQ

SEQ ID NO: 17080 - protein, 35 aa, Artificial sequence
  synthetic peptide
RVIVVSMNYRVGALGFLALPGNPEAPGNMGLFDQQ

SEQ ID NO: 17081 - protein, 35 aa, Artificial sequence
  synthetic peptide
VIVVSMNYRVGALGFLALPGNPEAPGNMGLFDQQL

SEQ ID NO: 17082 - protein, 35 aa, Artificial sequence
  synthetic peptide
IVVSMNYRVGALGFLALPGNPEAPGNMGLFDQQLA

SEQ ID NO: 17083 - protein, 35 aa, Artificial sequence
  synthetic peptide
VVSMNYRVGALGFLALPGNPEAPGNMGLFDQQLAL

SEQ ID NO: 17084 - protein, 35 aa, Artificial sequence
  synthetic peptide
VSMNYRVGALGFLALPGNPEAPGNMGLFDQQLALQ

SEQ ID NO: 17085 - protein, 35 aa, Artificial sequence
  synthetic peptide
SMNYRVGALGFLALPGNPEAPGNMGLFDQQLALQW

SEQ ID NO: 17086 - protein, 35 aa, Artificial sequence
  synthetic peptide
MNYRVGALGFLALPGNPEAPGNMGLFDQQLALQWV

SEQ ID NO: 17087 - protein, 35 aa, Artificial sequence
  synthetic peptide
NYRVGALGFLALPGNPEAPGNMGLFDQQLALQWVQ

SEQ ID NO: 17088 - protein, 35 aa, Artificial sequence
  synthetic peptide
YRVGALGFLALPGNPEAPGNMGLFDQQLALQWVQK

SEQ ID NO: 17089 - protein, 35 aa, Artificial sequence
  synthetic peptide
RVGALGFLALPGNPEAPGNMGLFDQQLALQWVQKN

SEQ ID NO: 17090 - protein, 35 aa, Artificial sequence
  synthetic peptide
VGALGFLALPGNPEAPGNMGLFDQQLALQWVQKNI

SEQ ID NO: 17091 - protein, 35 aa, Artificial sequence
  synthetic peptide
GALGFLALPGNPEAPGNMGLFDQQLALQWVQKNIA

SEQ ID NO: 17092 - protein, 35 aa, Artificial sequence
  synthetic peptide
ALGFLALPGNPEAPGNMGLFDQQLALQWVQKNIAA

SEQ ID NO: 17093 - protein, 35 aa, Artificial sequence
  synthetic peptide
LGFLALPGNPEAPGNMGLFDQQLALQWVQKNIAAF

SEQ ID NO: 17094 - protein, 35 aa, Artificial sequence
  synthetic peptide
GFLALPGNPEAPGNMGLFDQQLALQWVQKNIAAFG

SEQ ID NO: 17095 - protein, 35 aa, Artificial sequence
  synthetic peptide
FLALPGNPEAPGNMGLFDQQLALQWVQKNIAAFGG

SEQ ID NO: 17096 - protein, 35 aa, Artificial sequence
  synthetic peptide
LALPGNPEAPGNMGLFDQQLALQWVQKNIAAFGGN

SEQ ID NO: 17097 - protein, 35 aa, Artificial sequence
  synthetic peptide
ALPGNPEAPGNMGLFDQQLALQWVQKNIAAFGGNP

SEQ ID NO: 17098 - protein, 35 aa, Artificial sequence
  synthetic peptide
LPGNPEAPGNMGLFDQQLALQWVQKNIAAFGGNPK

SEQ ID NO: 17099 - protein, 35 aa, Artificial sequence
  synthetic peptide
PGNPEAPGNMGLFDQQLALQWVQKNIAAFGGNPKS

SEQ ID NO: 17100 - protein, 35 aa, Artificial sequence
  synthetic peptide
GNPEAPGNMGLFDQQLALQWVQKNIAAFGGNPKSV

SEQ ID NO: 17101 - protein, 35 aa, Artificial sequence
  synthetic peptide
NPEAPGNMGLFDQQLALQWVQKNIAAFGGNPKSVT

SEQ ID NO: 17102 - protein, 35 aa, Artificial sequence
  synthetic peptide
PEAPGNMGLFDQQLALQWVQKNIAAFGGNPKSVTL

SEQ ID NO: 17103 - protein, 35 aa, Artificial sequence
  synthetic peptide
EAPGNMGLFDQQLALQWVQKNIAAFGGNPKSVTLF

SEQ ID NO: 17104 - protein, 35 aa, Artificial sequence
  synthetic peptide
APGNMGLFDQQLALQWVQKNIAAFGGNPKSVTLFG

SEQ ID NO: 17105 - protein, 35 aa, Artificial sequence
  synthetic peptide
PGNMGLFDQQLALQWVQKNIAAFGGNPKSVTLFGE

SEQ ID NO: 17106 - protein, 35 aa, Artificial sequence
  synthetic peptide
GNMGLFDQQLALQWVQKNIAAFGGNPKSVTLFGES

SEQ ID NO: 17107 - protein, 35 aa, Artificial sequence
  synthetic peptide
NMGLFDQQLALQWVQKNIAAFGGNPKSVTLFGESA

SEQ ID NO: 17108 - protein, 35 aa, Artificial sequence
  synthetic peptide
MGLFDQQLALQWVQKNIAAFGGNPKSVTLFGESAG

SEQ ID NO: 17109 - protein, 35 aa, Artificial sequence
  synthetic peptide
GLFDQQLALQWVQKNIAAFGGNPKSVTLFGESAGA

SEQ ID NO: 17110 - protein, 35 aa, Artificial sequence
  synthetic peptide
LFDQQLALQWVQKNIAAFGGNPKSVTLFGESAGAA

SEQ ID NO: 17111 - protein, 35 aa, Artificial sequence
  synthetic peptide
FDQQLALQWVQKNIAAFGGNPKSVTLFGESAGAAS

SEQ ID NO: 17112 - protein, 35 aa, Artificial sequence
  synthetic peptide
DQQLALQWVQKNIAAFGGNPKSVTLFGESAGAASV

SEQ ID NO: 17113 - protein, 35 aa, Artificial sequence
  synthetic peptide
QQLALQWVQKNIAAFGGNPKSVTLFGESAGAASVS

SEQ ID NO: 17114 - protein, 35 aa, Artificial sequence
  synthetic peptide
QLALQWVQKNIAAFGGNPKSVTLFGESAGAASVSL

SEQ ID NO: 17115 - protein, 35 aa, Artificial sequence
  synthetic peptide
LALQWVQKNIAAFGGNPKSVTLFGESAGAASVSLH

SEQ ID NO: 17116 - protein, 35 aa, Artificial sequence
  synthetic peptide
ALQWVQKNIAAFGGNPKSVTLFGESAGAASVSLHL

SEQ ID NO: 17117 - protein, 35 aa, Artificial sequence
  synthetic peptide
LQWVQKNIAAFGGNPKSVTLFGESAGAASVSLHLL

SEQ ID NO: 17118 - protein, 35 aa, Artificial sequence
  synthetic peptide
QWVQKNIAAFGGNPKSVTLFGESAGAASVSLHLLS

SEQ ID NO: 17119 - protein, 35 aa, Artificial sequence
  synthetic peptide
WVQKNIAAFGGNPKSVTLFGESAGAASVSLHLLSP

SEQ ID NO: 17120 - protein, 35 aa, Artificial sequence
  synthetic peptide
VQKNIAAFGGNPKSVTLFGESAGAASVSLHLLSPG

SEQ ID NO: 17121 - protein, 35 aa, Artificial sequence
  synthetic peptide
QKNIAAFGGNPKSVTLFGESAGAASVSLHLLSPGS

SEQ ID NO: 17122 - protein, 35 aa, Artificial sequence
  synthetic peptide
KNIAAFGGNPKSVTLFGESAGAASVSLHLLSPGSH

SEQ ID NO: 17123 - protein, 35 aa, Artificial sequence
  synthetic peptide
NIAAFGGNPKSVTLFGESAGAASVSLHLLSPGSHS

SEQ ID NO: 17124 - protein, 35 aa, Artificial sequence
  synthetic peptide
IAAFGGNPKSVTLFGESAGAASVSLHLLSPGSHSL

SEQ ID NO: 17125 - protein, 35 aa, Artificial sequence
  synthetic peptide
AAFGGNPKSVTLFGESAGAASVSLHLLSPGSHSLF

SEQ ID NO: 17126 - protein, 35 aa, Artificial sequence
  synthetic peptide
AFGGNPKSVTLFGESAGAASVSLHLLSPGSHSLFT

SEQ ID NO: 17127 - protein, 35 aa, Artificial sequence
  synthetic peptide
FGGNPKSVTLFGESAGAASVSLHLLSPGSHSLFTR

SEQ ID NO: 17128 - protein, 35 aa, Artificial sequence
  synthetic peptide
GGNPKSVTLFGESAGAASVSLHLLSPGSHSLFTRA

SEQ ID NO: 17129 - protein, 35 aa, Artificial sequence
  synthetic peptide
GNPKSVTLFGESAGAASVSLHLLSPGSHSLFTRAI

SEQ ID NO: 17130 - protein, 35 aa, Artificial sequence
  synthetic peptide
NPKSVTLFGESAGAASVSLHLLSPGSHSLFTRAIL

SEQ ID NO: 17131 - protein, 35 aa, Artificial sequence
  synthetic peptide
PKSVTLFGESAGAASVSLHLLSPGSHSLFTRAILQ

SEQ ID NO: 17132 - protein, 35 aa, Artificial sequence
  synthetic peptide
KSVTLFGESAGAASVSLHLLSPGSHSLFTRAILQS

SEQ ID NO: 17133 - protein, 35 aa, Artificial sequence
  synthetic peptide
SVTLFGESAGAASVSLHLLSPGSHSLFTRAILQSG

SEQ ID NO: 17134 - protein, 35 aa, Artificial sequence
  synthetic peptide
VTLFGESAGAASVSLHLLSPGSHSLFTRAILQSGS

SEQ ID NO: 17135 - protein, 35 aa, Artificial sequence
  synthetic peptide
TLFGESAGAASVSLHLLSPGSHSLFTRAILQSGSF

SEQ ID NO: 17136 - protein, 35 aa, Artificial sequence
  synthetic peptide
LFGESAGAASVSLHLLSPGSHSLFTRAILQSGSFN

SEQ ID NO: 17137 - protein, 35 aa, Artificial sequence
  synthetic peptide
FGESAGAASVSLHLLSPGSHSLFTRAILQSGSFNA

SEQ ID NO: 17138 - protein, 35 aa, Artificial sequence
  synthetic peptide
GESAGAASVSLHLLSPGSHSLFTRAILQSGSFNAP

SEQ ID NO: 17139 - protein, 35 aa, Artificial sequence
  synthetic peptide
ESAGAASVSLHLLSPGSHSLFTRAILQSGSFNAPW

SEQ ID NO: 17140 - protein, 35 aa, Artificial sequence
  synthetic peptide
SAGAASVSLHLLSPGSHSLFTRAILQSGSFNAPWA

SEQ ID NO: 17141 - protein, 35 aa, Artificial sequence
  synthetic peptide
AGAASVSLHLLSPGSHSLFTRAILQSGSFNAPWAV

SEQ ID NO: 17142 - protein, 35 aa, Artificial sequence
  synthetic peptide
GAASVSLHLLSPGSHSLFTRAILQSGSFNAPWAVT

SEQ ID NO: 17143 - protein, 35 aa, Artificial sequence
  synthetic peptide
AASVSLHLLSPGSHSLFTRAILQSGSFNAPWAVTS

SEQ ID NO: 17144 - protein, 35 aa, Artificial sequence
  synthetic peptide
ASVSLHLLSPGSHSLFTRAILQSGSFNAPWAVTSL

SEQ ID NO: 17145 - protein, 35 aa, Artificial sequence
  synthetic peptide
SVSLHLLSPGSHSLFTRAILQSGSFNAPWAVTSLY

SEQ ID NO: 17146 - protein, 35 aa, Artificial sequence
  synthetic peptide
VSLHLLSPGSHSLFTRAILQSGSFNAPWAVTSLYE

SEQ ID NO: 17147 - protein, 35 aa, Artificial sequence
  synthetic peptide
SLHLLSPGSHSLFTRAILQSGSFNAPWAVTSLYEA

SEQ ID NO: 17148 - protein, 35 aa, Artificial sequence
  synthetic peptide
LHLLSPGSHSLFTRAILQSGSFNAPWAVTSLYEAR

SEQ ID NO: 17149 - protein, 35 aa, Artificial sequence
  synthetic peptide
HLLSPGSHSLFTRAILQSGSFNAPWAVTSLYEARN

SEQ ID NO: 17150 - protein, 35 aa, Artificial sequence
  synthetic peptide
LLSPGSHSLFTRAILQSGSFNAPWAVTSLYEARNR

SEQ ID NO: 17151 - protein, 35 aa, Artificial sequence
  synthetic peptide
LSPGSHSLFTRAILQSGSFNAPWAVTSLYEARNRT

SEQ ID NO: 17152 - protein, 35 aa, Artificial sequence
  synthetic peptide
SPGSHSLFTRAILQSGSFNAPWAVTSLYEARNRTL

SEQ ID NO: 17153 - protein, 35 aa, Artificial sequence
  synthetic peptide
PGSHSLFTRAILQSGSFNAPWAVTSLYEARNRTLN

SEQ ID NO: 17154 - protein, 35 aa, Artificial sequence
  synthetic peptide
GSHSLFTRAILQSGSFNAPWAVTSLYEARNRTLNL

SEQ ID NO: 17155 - protein, 35 aa, Artificial sequence
  synthetic peptide
SHSLFTRAILQSGSFNAPWAVTSLYEARNRTLNLA

SEQ ID NO: 17156 - protein, 35 aa, Artificial sequence
  synthetic peptide
HSLFTRAILQSGSFNAPWAVTSLYEARNRTLNLAK

SEQ ID NO: 17157 - protein, 35 aa, Artificial sequence
  synthetic peptide
SLFTRAILQSGSFNAPWAVTSLYEARNRTLNLAKL

SEQ ID NO: 17158 - protein, 35 aa, Artificial sequence
  synthetic peptide
LFTRAILQSGSFNAPWAVTSLYEARNRTLNLAKLT

SEQ ID NO: 17159 - protein, 35 aa, Artificial sequence
  synthetic peptide
FTRAILQSGSFNAPWAVTSLYEARNRTLNLAKLTG

SEQ ID NO: 17160 - protein, 35 aa, Artificial sequence
  synthetic peptide
TRAILQSGSFNAPWAVTSLYEARNRTLNLAKLTGC

SEQ ID NO: 17161 - protein, 35 aa, Artificial sequence
  synthetic peptide
RAILQSGSFNAPWAVTSLYEARNRTLNLAKLTGCS

SEQ ID NO: 17162 - protein, 35 aa, Artificial sequence
  synthetic peptide
AILQSGSFNAPWAVTSLYEARNRTLNLAKLTGCSR

SEQ ID NO: 17163 - protein, 35 aa, Artificial sequence
  synthetic peptide
ILQSGSFNAPWAVTSLYEARNRTLNLAKLTGCSRE

SEQ ID NO: 17164 - protein, 35 aa, Artificial sequence
  synthetic peptide
LQSGSFNAPWAVTSLYEARNRTLNLAKLTGCSREN

SEQ ID NO: 17165 - protein, 35 aa, Artificial sequence
  synthetic peptide
QSGSFNAPWAVTSLYEARNRTLNLAKLTGCSRENE

SEQ ID NO: 17166 - protein, 35 aa, Artificial sequence
  synthetic peptide
SGSFNAPWAVTSLYEARNRTLNLAKLTGCSRENET

SEQ ID NO: 17167 - protein, 35 aa, Artificial sequence
  synthetic peptide
GSFNAPWAVTSLYEARNRTLNLAKLTGCSRENETE

SEQ ID NO: 17168 - protein, 35 aa, Artificial sequence
  synthetic peptide
SFNAPWAVTSLYEARNRTLNLAKLTGCSRENETEI

SEQ ID NO: 17169 - protein, 35 aa, Artificial sequence
  synthetic peptide
FNAPWAVTSLYEARNRTLNLAKLTGCSRENETEII

SEQ ID NO: 17170 - protein, 35 aa, Artificial sequence
  synthetic peptide
NAPWAVTSLYEARNRTLNLAKLTGCSRENETEIIK

SEQ ID NO: 17171 - protein, 35 aa, Artificial sequence
  synthetic peptide
APWAVTSLYEARNRTLNLAKLTGCSRENETEIIKC

SEQ ID NO: 17172 - protein, 35 aa, Artificial sequence
  synthetic peptide
PWAVTSLYEARNRTLNLAKLTGCSRENETEIIKCL

SEQ ID NO: 17173 - protein, 35 aa, Artificial sequence
  synthetic peptide
WAVTSLYEARNRTLNLAKLTGCSRENETEIIKCLR

SEQ ID NO: 17174 - protein, 35 aa, Artificial sequence
  synthetic peptide
AVTSLYEARNRTLNLAKLTGCSRENETEIIKCLRN

SEQ ID NO: 17175 - protein, 35 aa, Artificial sequence
  synthetic peptide
VTSLYEARNRTLNLAKLTGCSRENETEIIKCLRNK

SEQ ID NO: 17176 - protein, 35 aa, Artificial sequence
  synthetic peptide
TSLYEARNRTLNLAKLTGCSRENETEIIKCLRNKD

SEQ ID NO: 17177 - protein, 35 aa, Artificial sequence
  synthetic peptide
SLYEARNRTLNLAKLTGCSRENETEIIKCLRNKDP

SEQ ID NO: 17178 - protein, 35 aa, Artificial sequence
  synthetic peptide
LYEARNRTLNLAKLTGCSRENETEIIKCLRNKDPQ

SEQ ID NO: 17179 - protein, 35 aa, Artificial sequence
  synthetic peptide
YEARNRTLNLAKLTGCSRENETEIIKCLRNKDPQE

SEQ ID NO: 17180 - protein, 35 aa, Artificial sequence
  synthetic peptide
EARNRTLNLAKLTGCSRENETEIIKCLRNKDPQEI

SEQ ID NO: 17181 - protein, 35 aa, Artificial sequence
  synthetic peptide
ARNRTLNLAKLTGCSRENETEIIKCLRNKDPQEIL

SEQ ID NO: 17182 - protein, 35 aa, Artificial sequence
  synthetic peptide
RNRTLNLAKLTGCSRENETEIIKCLRNKDPQEILL

SEQ ID NO: 17183 - protein, 35 aa, Artificial sequence
  synthetic peptide
NRTLNLAKLTGCSRENETEIIKCLRNKDPQEILLN

SEQ ID NO: 17184 - protein, 35 aa, Artificial sequence
  synthetic peptide
RTLNLAKLTGCSRENETEIIKCLRNKDPQEILLNE

SEQ ID NO: 17185 - protein, 35 aa, Artificial sequence
  synthetic peptide
TLNLAKLTGCSRENETEIIKCLRNKDPQEILLNEA

SEQ ID NO: 17186 - protein, 35 aa, Artificial sequence
  synthetic peptide
LNLAKLTGCSRENETEIIKCLRNKDPQEILLNEAF

SEQ ID NO: 17187 - protein, 35 aa, Artificial sequence
  synthetic peptide
NLAKLTGCSRENETEIIKCLRNKDPQEILLNEAFV

SEQ ID NO: 17188 - protein, 35 aa, Artificial sequence
  synthetic peptide
LAKLTGCSRENETEIIKCLRNKDPQEILLNEAFVV

SEQ ID NO: 17189 - protein, 35 aa, Artificial sequence
  synthetic peptide
AKLTGCSRENETEIIKCLRNKDPQEILLNEAFVVP

SEQ ID NO: 17190 - protein, 35 aa, Artificial sequence
  synthetic peptide
KLTGCSRENETEIIKCLRNKDPQEILLNEAFVVPY

SEQ ID NO: 17191 - protein, 35 aa, Artificial sequence
  synthetic peptide
LTGCSRENETEIIKCLRNKDPQEILLNEAFVVPYG

SEQ ID NO: 17192 - protein, 35 aa, Artificial sequence
  synthetic peptide
TGCSRENETEIIKCLRNKDPQEILLNEAFVVPYGT

SEQ ID NO: 17193 - protein, 35 aa, Artificial sequence
  synthetic peptide
GCSRENETEIIKCLRNKDPQEILLNEAFVVPYGTP

SEQ ID NO: 17194 - protein, 35 aa, Artificial sequence
  synthetic peptide
CSRENETEIIKCLRNKDPQEILLNEAFVVPYGTPL

SEQ ID NO: 17195 - protein, 35 aa, Artificial sequence
  synthetic peptide
SRENETEIIKCLRNKDPQEILLNEAFVVPYGTPLS

SEQ ID NO: 17196 - protein, 35 aa, Artificial sequence
  synthetic peptide
RENETEIIKCLRNKDPQEILLNEAFVVPYGTPLSV

SEQ ID NO: 17197 - protein, 35 aa, Artificial sequence
  synthetic peptide
ENETEIIKCLRNKDPQEILLNEAFVVPYGTPLSVN

SEQ ID NO: 17198 - protein, 35 aa, Artificial sequence
  synthetic peptide
NETEIIKCLRNKDPQEILLNEAFVVPYGTPLSVNF

SEQ ID NO: 17199 - protein, 35 aa, Artificial sequence
  synthetic peptide
ETEIIKCLRNKDPQEILLNEAFVVPYGTPLSVNFG

SEQ ID NO: 17200 - protein, 35 aa, Artificial sequence
  synthetic peptide
TEIIKCLRNKDPQEILLNEAFVVPYGTPLSVNFGP

SEQ ID NO: 17201 - protein, 35 aa, Artificial sequence
  synthetic peptide
EIIKCLRNKDPQEILLNEAFVVPYGTPLSVNFGPT

SEQ ID NO: 17202 - protein, 35 aa, Artificial sequence
  synthetic peptide
IIKCLRNKDPQEILLNEAFVVPYGTPLSVNFGPTV

SEQ ID NO: 17203 - protein, 35 aa, Artificial sequence
  synthetic peptide
IKCLRNKDPQEILLNEAFVVPYGTPLSVNFGPTVD

SEQ ID NO: 17204 - protein, 35 aa, Artificial sequence
  synthetic peptide
KCLRNKDPQEILLNEAFVVPYGTPLSVNFGPTVDG

SEQ ID NO: 17205 - protein, 35 aa, Artificial sequence
  synthetic peptide
CLRNKDPQEILLNEAFVVPYGTPLSVNFGPTVDGD

SEQ ID NO: 17206 - protein, 35 aa, Artificial sequence
  synthetic peptide
LRNKDPQEILLNEAFVVPYGTPLSVNFGPTVDGDF

SEQ ID NO: 17207 - protein, 35 aa, Artificial sequence
  synthetic peptide
RNKDPQEILLNEAFVVPYGTPLSVNFGPTVDGDFL

SEQ ID NO: 17208 - protein, 35 aa, Artificial sequence
  synthetic peptide
NKDPQEILLNEAFVVPYGTPLSVNFGPTVDGDFLT

SEQ ID NO: 17209 - protein, 35 aa, Artificial sequence
  synthetic peptide
KDPQEILLNEAFVVPYGTPLSVNFGPTVDGDFLTD

SEQ ID NO: 17210 - protein, 35 aa, Artificial sequence
  synthetic peptide
DPQEILLNEAFVVPYGTPLSVNFGPTVDGDFLTDM

SEQ ID NO: 17211 - protein, 35 aa, Artificial sequence
  synthetic peptide
PQEILLNEAFVVPYGTPLSVNFGPTVDGDFLTDMP

SEQ ID NO: 17212 - protein, 35 aa, Artificial sequence
  synthetic peptide
QEILLNEAFVVPYGTPLSVNFGPTVDGDFLTDMPD

SEQ ID NO: 17213 - protein, 35 aa, Artificial sequence
  synthetic peptide
EILLNEAFVVPYGTPLSVNFGPTVDGDFLTDMPDI

SEQ ID NO: 17214 - protein, 35 aa, Artificial sequence
  synthetic peptide
ILLNEAFVVPYGTPLSVNFGPTVDGDFLTDMPDIL

SEQ ID NO: 17215 - protein, 35 aa, Artificial sequence
  synthetic peptide
LLNEAFVVPYGTPLSVNFGPTVDGDFLTDMPDILL

SEQ ID NO: 17216 - protein, 35 aa, Artificial sequence
  synthetic peptide
LNEAFVVPYGTPLSVNFGPTVDGDFLTDMPDILLE

SEQ ID NO: 17217 - protein, 35 aa, Artificial sequence
  synthetic peptide
NEAFVVPYGTPLSVNFGPTVDGDFLTDMPDILLEL

SEQ ID NO: 17218 - protein, 35 aa, Artificial sequence
  synthetic peptide
EAFVVPYGTPLSVNFGPTVDGDFLTDMPDILLELG

SEQ ID NO: 17219 - protein, 35 aa, Artificial sequence
  synthetic peptide
AFVVPYGTPLSVNFGPTVDGDFLTDMPDILLELGQ

SEQ ID NO: 17220 - protein, 35 aa, Artificial sequence
  synthetic peptide
FVVPYGTPLSVNFGPTVDGDFLTDMPDILLELGQF

SEQ ID NO: 17221 - protein, 35 aa, Artificial sequence
  synthetic peptide
VVPYGTPLSVNFGPTVDGDFLTDMPDILLELGQFK

SEQ ID NO: 17222 - protein, 35 aa, Artificial sequence
  synthetic peptide
VPYGTPLSVNFGPTVDGDFLTDMPDILLELGQFKK

SEQ ID NO: 17223 - protein, 35 aa, Artificial sequence
  synthetic peptide
PYGTPLSVNFGPTVDGDFLTDMPDILLELGQFKKT

SEQ ID NO: 17224 - protein, 35 aa, Artificial sequence
  synthetic peptide
YGTPLSVNFGPTVDGDFLTDMPDILLELGQFKKTQ

SEQ ID NO: 17225 - protein, 35 aa, Artificial sequence
  synthetic peptide
GTPLSVNFGPTVDGDFLTDMPDILLELGQFKKTQI

SEQ ID NO: 17226 - protein, 35 aa, Artificial sequence
  synthetic peptide
TPLSVNFGPTVDGDFLTDMPDILLELGQFKKTQIL

SEQ ID NO: 17227 - protein, 35 aa, Artificial sequence
  synthetic peptide
PLSVNFGPTVDGDFLTDMPDILLELGQFKKTQILV

SEQ ID NO: 17228 - protein, 35 aa, Artificial sequence
  synthetic peptide
LSVNFGPTVDGDFLTDMPDILLELGQFKKTQILVG

SEQ ID NO: 17229 - protein, 35 aa, Artificial sequence
  synthetic peptide
SVNFGPTVDGDFLTDMPDILLELGQFKKTQILVGV

SEQ ID NO: 17230 - protein, 35 aa, Artificial sequence
  synthetic peptide
VNFGPTVDGDFLTDMPDILLELGQFKKTQILVGVN

SEQ ID NO: 17231 - protein, 35 aa, Artificial sequence
  synthetic peptide
NFGPTVDGDFLTDMPDILLELGQFKKTQILVGVNK

SEQ ID NO: 17232 - protein, 35 aa, Artificial sequence
  synthetic peptide
FGPTVDGDFLTDMPDILLELGQFKKTQILVGVNKD

SEQ ID NO: 17233 - protein, 35 aa, Artificial sequence
  synthetic peptide
GPTVDGDFLTDMPDILLELGQFKKTQILVGVNKDE

SEQ ID NO: 17234 - protein, 35 aa, Artificial sequence
  synthetic peptide
PTVDGDFLTDMPDILLELGQFKKTQILVGVNKDEG

SEQ ID NO: 17235 - protein, 35 aa, Artificial sequence
  synthetic peptide
TVDGDFLTDMPDILLELGQFKKTQILVGVNKDEGT

SEQ ID NO: 17236 - protein, 35 aa, Artificial sequence
  synthetic peptide
VDGDFLTDMPDILLELGQFKKTQILVGVNKDEGTA

SEQ ID NO: 17237 - protein, 35 aa, Artificial sequence
  synthetic peptide
DGDFLTDMPDILLELGQFKKTQILVGVNKDEGTAF

SEQ ID NO: 17238 - protein, 35 aa, Artificial sequence
  synthetic peptide
GDFLTDMPDILLELGQFKKTQILVGVNKDEGTAFL

SEQ ID NO: 17239 - protein, 35 aa, Artificial sequence
  synthetic peptide
DFLTDMPDILLELGQFKKTQILVGVNKDEGTAFLV

SEQ ID NO: 17240 - protein, 35 aa, Artificial sequence
  synthetic peptide
FLTDMPDILLELGQFKKTQILVGVNKDEGTAFLVY

SEQ ID NO: 17241 - protein, 35 aa, Artificial sequence
  synthetic peptide
LTDMPDILLELGQFKKTQILVGVNKDEGTAFLVYG

SEQ ID NO: 17242 - protein, 35 aa, Artificial sequence
  synthetic peptide
TDMPDILLELGQFKKTQILVGVNKDEGTAFLVYGA

SEQ ID NO: 17243 - protein, 35 aa, Artificial sequence
  synthetic peptide
DMPDILLELGQFKKTQILVGVNKDEGTAFLVYGAP

SEQ ID NO: 17244 - protein, 35 aa, Artificial sequence
  synthetic peptide
MPDILLELGQFKKTQILVGVNKDEGTAFLVYGAPG

SEQ ID NO: 17245 - protein, 35 aa, Artificial sequence
  synthetic peptide
PDILLELGQFKKTQILVGVNKDEGTAFLVYGAPGF

SEQ ID NO: 17246 - protein, 35 aa, Artificial sequence
  synthetic peptide
DILLELGQFKKTQILVGVNKDEGTAFLVYGAPGFS

SEQ ID NO: 17247 - protein, 35 aa, Artificial sequence
  synthetic peptide
ILLELGQFKKTQILVGVNKDEGTAFLVYGAPGFSK

SEQ ID NO: 17248 - protein, 35 aa, Artificial sequence
  synthetic peptide
LLELGQFKKTQILVGVNKDEGTAFLVYGAPGFSKD

SEQ ID NO: 17249 - protein, 35 aa, Artificial sequence
  synthetic peptide
LELGQFKKTQILVGVNKDEGTAFLVYGAPGFSKDN

SEQ ID NO: 17250 - protein, 35 aa, Artificial sequence
  synthetic peptide
ELGQFKKTQILVGVNKDEGTAFLVYGAPGFSKDNN

SEQ ID NO: 17251 - protein, 35 aa, Artificial sequence
  synthetic peptide
LGQFKKTQILVGVNKDEGTAFLVYGAPGFSKDNNS

SEQ ID NO: 17252 - protein, 35 aa, Artificial sequence
  synthetic peptide
GQFKKTQILVGVNKDEGTAFLVYGAPGFSKDNNSI

SEQ ID NO: 17253 - protein, 35 aa, Artificial sequence
  synthetic peptide
QFKKTQILVGVNKDEGTAFLVYGAPGFSKDNNSII

SEQ ID NO: 17254 - protein, 35 aa, Artificial sequence
  synthetic peptide
FKKTQILVGVNKDEGTAFLVYGAPGFSKDNNSIIT

SEQ ID NO: 17255 - protein, 35 aa, Artificial sequence
  synthetic peptide
KKTQILVGVNKDEGTAFLVYGAPGFSKDNNSIITR

SEQ ID NO: 17256 - protein, 35 aa, Artificial sequence
  synthetic peptide
KTQILVGVNKDEGTAFLVYGAPGFSKDNNSIITRK

SEQ ID NO: 17257 - protein, 35 aa, Artificial sequence
  synthetic peptide
TQILVGVNKDEGTAFLVYGAPGFSKDNNSIITRKE

SEQ ID NO: 17258 - protein, 35 aa, Artificial sequence
  synthetic peptide
QILVGVNKDEGTAFLVYGAPGFSKDNNSIITRKEF

SEQ ID NO: 17259 - protein, 35 aa, Artificial sequence
  synthetic peptide
ILVGVNKDEGTAFLVYGAPGFSKDNNSIITRKEFQ

SEQ ID NO: 17260 - protein, 35 aa, Artificial sequence
  synthetic peptide
LVGVNKDEGTAFLVYGAPGFSKDNNSIITRKEFQE

SEQ ID NO: 17261 - protein, 35 aa, Artificial sequence
  synthetic peptide
VGVNKDEGTAFLVYGAPGFSKDNNSIITRKEFQEG

SEQ ID NO: 17262 - protein, 35 aa, Artificial sequence
  synthetic peptide
GVNKDEGTAFLVYGAPGFSKDNNSIITRKEFQEGL

SEQ ID NO: 17263 - protein, 35 aa, Artificial sequence
  synthetic peptide
VNKDEGTAFLVYGAPGFSKDNNSIITRKEFQEGLK

SEQ ID NO: 17264 - protein, 35 aa, Artificial sequence
  synthetic peptide
NKDEGTAFLVYGAPGFSKDNNSIITRKEFQEGLKI

SEQ ID NO: 17265 - protein, 35 aa, Artificial sequence
  synthetic peptide
KDEGTAFLVYGAPGFSKDNNSIITRKEFQEGLKIF

SEQ ID NO: 17266 - protein, 35 aa, Artificial sequence
  synthetic peptide
DEGTAFLVYGAPGFSKDNNSIITRKEFQEGLKIFF

SEQ ID NO: 17267 - protein, 35 aa, Artificial sequence
  synthetic peptide
EGTAFLVYGAPGFSKDNNSIITRKEFQEGLKIFFP

SEQ ID NO: 17268 - protein, 35 aa, Artificial sequence
  synthetic peptide
GTAFLVYGAPGFSKDNNSIITRKEFQEGLKIFFPG

SEQ ID NO: 17269 - protein, 35 aa, Artificial sequence
  synthetic peptide
TAFLVYGAPGFSKDNNSIITRKEFQEGLKIFFPGV

SEQ ID NO: 17270 - protein, 35 aa, Artificial sequence
  synthetic peptide
AFLVYGAPGFSKDNNSIITRKEFQEGLKIFFPGVS

SEQ ID NO: 17271 - protein, 35 aa, Artificial sequence
  synthetic peptide
FLVYGAPGFSKDNNSIITRKEFQEGLKIFFPGVSE

SEQ ID NO: 17272 - protein, 35 aa, Artificial sequence
  synthetic peptide
LVYGAPGFSKDNNSIITRKEFQEGLKIFFPGVSEF

SEQ ID NO: 17273 - protein, 35 aa, Artificial sequence
  synthetic peptide
VYGAPGFSKDNNSIITRKEFQEGLKIFFPGVSEFG

SEQ ID NO: 17274 - protein, 35 aa, Artificial sequence
  synthetic peptide
YGAPGFSKDNNSIITRKEFQEGLKIFFPGVSEFGK

SEQ ID NO: 17275 - protein, 35 aa, Artificial sequence
  synthetic peptide
GAPGFSKDNNSIITRKEFQEGLKIFFPGVSEFGKE

SEQ ID NO: 17276 - protein, 35 aa, Artificial sequence
  synthetic peptide
APGFSKDNNSIITRKEFQEGLKIFFPGVSEFGKES

SEQ ID NO: 17277 - protein, 35 aa, Artificial sequence
  synthetic peptide
PGFSKDNNSIITRKEFQEGLKIFFPGVSEFGKESI

SEQ ID NO: 17278 - protein, 35 aa, Artificial sequence
  synthetic peptide
GFSKDNNSIITRKEFQEGLKIFFPGVSEFGKESIL

SEQ ID NO: 17279 - protein, 35 aa, Artificial sequence
  synthetic peptide
FSKDNNSIITRKEFQEGLKIFFPGVSEFGKESILF

SEQ ID NO: 17280 - protein, 35 aa, Artificial sequence
  synthetic peptide
SKDNNSIITRKEFQEGLKIFFPGVSEFGKESILFH

SEQ ID NO: 17281 - protein, 35 aa, Artificial sequence
  synthetic peptide
KDNNSIITRKEFQEGLKIFFPGVSEFGKESILFHY

SEQ ID NO: 17282 - protein, 35 aa, Artificial sequence
  synthetic peptide
DNNSIITRKEFQEGLKIFFPGVSEFGKESILFHYT

SEQ ID NO: 17283 - protein, 35 aa, Artificial sequence
  synthetic peptide
NNSIITRKEFQEGLKIFFPGVSEFGKESILFHYTD

SEQ ID NO: 17284 - protein, 35 aa, Artificial sequence
  synthetic peptide
NSIITRKEFQEGLKIFFPGVSEFGKESILFHYTDW

SEQ ID NO: 17285 - protein, 35 aa, Artificial sequence
  synthetic peptide
SIITRKEFQEGLKIFFPGVSEFGKESILFHYTDWV

SEQ ID NO: 17286 - protein, 35 aa, Artificial sequence
  synthetic peptide
IITRKEFQEGLKIFFPGVSEFGKESILFHYTDWVD

SEQ ID NO: 17287 - protein, 35 aa, Artificial sequence
  synthetic peptide
ITRKEFQEGLKIFFPGVSEFGKESILFHYTDWVDD

SEQ ID NO: 17288 - protein, 35 aa, Artificial sequence
  synthetic peptide
TRKEFQEGLKIFFPGVSEFGKESILFHYTDWVDDQ

SEQ ID NO: 17289 - protein, 35 aa, Artificial sequence
  synthetic peptide
RKEFQEGLKIFFPGVSEFGKESILFHYTDWVDDQR

SEQ ID NO: 17290 - protein, 35 aa, Artificial sequence
  synthetic peptide
KEFQEGLKIFFPGVSEFGKESILFHYTDWVDDQRP

SEQ ID NO: 17291 - protein, 35 aa, Artificial sequence
  synthetic peptide
EFQEGLKIFFPGVSEFGKESILFHYTDWVDDQRPE

SEQ ID NO: 17292 - protein, 35 aa, Artificial sequence
  synthetic peptide
FQEGLKIFFPGVSEFGKESILFHYTDWVDDQRPEN

SEQ ID NO: 17293 - protein, 35 aa, Artificial sequence
  synthetic peptide
QEGLKIFFPGVSEFGKESILFHYTDWVDDQRPENY

SEQ ID NO: 17294 - protein, 35 aa, Artificial sequence
  synthetic peptide
EGLKIFFPGVSEFGKESILFHYTDWVDDQRPENYR

SEQ ID NO: 17295 - protein, 35 aa, Artificial sequence
  synthetic peptide
GLKIFFPGVSEFGKESILFHYTDWVDDQRPENYRE

SEQ ID NO: 17296 - protein, 35 aa, Artificial sequence
  synthetic peptide
LKIFFPGVSEFGKESILFHYTDWVDDQRPENYREA

SEQ ID NO: 17297 - protein, 35 aa, Artificial sequence
  synthetic peptide
KIFFPGVSEFGKESILFHYTDWVDDQRPENYREAL

SEQ ID NO: 17298 - protein, 35 aa, Artificial sequence
  synthetic peptide
IFFPGVSEFGKESILFHYTDWVDDQRPENYREALG

SEQ ID NO: 17299 - protein, 35 aa, Artificial sequence
  synthetic peptide
FFPGVSEFGKESILFHYTDWVDDQRPENYREALGD

SEQ ID NO: 17300 - protein, 35 aa, Artificial sequence
  synthetic peptide
FPGVSEFGKESILFHYTDWVDDQRPENYREALGDV

SEQ ID NO: 17301 - protein, 35 aa, Artificial sequence
  synthetic peptide
PGVSEFGKESILFHYTDWVDDQRPENYREALGDVV

SEQ ID NO: 17302 - protein, 35 aa, Artificial sequence
  synthetic peptide
GVSEFGKESILFHYTDWVDDQRPENYREALGDVVG

SEQ ID NO: 17303 - protein, 35 aa, Artificial sequence
  synthetic peptide
VSEFGKESILFHYTDWVDDQRPENYREALGDVVGD

SEQ ID NO: 17304 - protein, 35 aa, Artificial sequence
  synthetic peptide
SEFGKESILFHYTDWVDDQRPENYREALGDVVGDY

SEQ ID NO: 17305 - protein, 35 aa, Artificial sequence
  synthetic peptide
EFGKESILFHYTDWVDDQRPENYREALGDVVGDYN

SEQ ID NO: 17306 - protein, 35 aa, Artificial sequence
  synthetic peptide
FGKESILFHYTDWVDDQRPENYREALGDVVGDYNF

SEQ ID NO: 17307 - protein, 35 aa, Artificial sequence
  synthetic peptide
GKESILFHYTDWVDDQRPENYREALGDVVGDYNFI

SEQ ID NO: 17308 - protein, 35 aa, Artificial sequence
  synthetic peptide
KESILFHYTDWVDDQRPENYREALGDVVGDYNFIC

SEQ ID NO: 17309 - protein, 35 aa, Artificial sequence
  synthetic peptide
ESILFHYTDWVDDQRPENYREALGDVVGDYNFICP

SEQ ID NO: 17310 - protein, 35 aa, Artificial sequence
  synthetic peptide
SILFHYTDWVDDQRPENYREALGDVVGDYNFICPA

SEQ ID NO: 17311 - protein, 35 aa, Artificial sequence
  synthetic peptide
ILFHYTDWVDDQRPENYREALGDVVGDYNFICPAL

SEQ ID NO: 17312 - protein, 35 aa, Artificial sequence
  synthetic peptide
LFHYTDWVDDQRPENYREALGDVVGDYNFICPALE

SEQ ID NO: 17313 - protein, 35 aa, Artificial sequence
  synthetic peptide
FHYTDWVDDQRPENYREALGDVVGDYNFICPALEF

SEQ ID NO: 17314 - protein, 35 aa, Artificial sequence
  synthetic peptide
HYTDWVDDQRPENYREALGDVVGDYNFICPALEFT

SEQ ID NO: 17315 - protein, 35 aa, Artificial sequence
  synthetic peptide
YTDWVDDQRPENYREALGDVVGDYNFICPALEFTK

SEQ ID NO: 17316 - protein, 35 aa, Artificial sequence
  synthetic peptide
TDWVDDQRPENYREALGDVVGDYNFICPALEFTKK

SEQ ID NO: 17317 - protein, 35 aa, Artificial sequence
  synthetic peptide
DWVDDQRPENYREALGDVVGDYNFICPALEFTKKF

SEQ ID NO: 17318 - protein, 35 aa, Artificial sequence
  synthetic peptide
WVDDQRPENYREALGDVVGDYNFICPALEFTKKFS

SEQ ID NO: 17319 - protein, 35 aa, Artificial sequence
  synthetic peptide
VDDQRPENYREALGDVVGDYNFICPALEFTKKFSE

SEQ ID NO: 17320 - protein, 35 aa, Artificial sequence
  synthetic peptide
DDQRPENYREALGDVVGDYNFICPALEFTKKFSEW

SEQ ID NO: 17321 - protein, 35 aa, Artificial sequence
  synthetic peptide
DQRPENYREALGDVVGDYNFICPALEFTKKFSEWG

SEQ ID NO: 17322 - protein, 35 aa, Artificial sequence
  synthetic peptide
QRPENYREALGDVVGDYNFICPALEFTKKFSEWGN

SEQ ID NO: 17323 - protein, 35 aa, Artificial sequence
  synthetic peptide
RPENYREALGDVVGDYNFICPALEFTKKFSEWGNN

SEQ ID NO: 17324 - protein, 35 aa, Artificial sequence
  synthetic peptide
PENYREALGDVVGDYNFICPALEFTKKFSEWGNNA

SEQ ID NO: 17325 - protein, 35 aa, Artificial sequence
  synthetic peptide
ENYREALGDVVGDYNFICPALEFTKKFSEWGNNAF

SEQ ID NO: 17326 - protein, 35 aa, Artificial sequence
  synthetic peptide
NYREALGDVVGDYNFICPALEFTKKFSEWGNNAFF

SEQ ID NO: 17327 - protein, 35 aa, Artificial sequence
  synthetic peptide
YREALGDVVGDYNFICPALEFTKKFSEWGNNAFFY

SEQ ID NO: 17328 - protein, 35 aa, Artificial sequence
  synthetic peptide
REALGDVVGDYNFICPALEFTKKFSEWGNNAFFYY

SEQ ID NO: 17329 - protein, 35 aa, Artificial sequence
  synthetic peptide
EALGDVVGDYNFICPALEFTKKFSEWGNNAFFYYF

SEQ ID NO: 17330 - protein, 35 aa, Artificial sequence
  synthetic peptide
ALGDVVGDYNFICPALEFTKKFSEWGNNAFFYYFE

SEQ ID NO: 17331 - protein, 35 aa, Artificial sequence
  synthetic peptide
LGDVVGDYNFICPALEFTKKFSEWGNNAFFYYFEH

SEQ ID NO: 17332 - protein, 35 aa, Artificial sequence
  synthetic peptide
GDVVGDYNFICPALEFTKKFSEWGNNAFFYYFEHR

SEQ ID NO: 17333 - protein, 35 aa, Artificial sequence
  synthetic peptide
DVVGDYNFICPALEFTKKFSEWGNNAFFYYFEHRS

SEQ ID NO: 17334 - protein, 35 aa, Artificial sequence
  synthetic peptide
VVGDYNFICPALEFTKKFSEWGNNAFFYYFEHRSS

SEQ ID NO: 17335 - protein, 35 aa, Artificial sequence
  synthetic peptide
VGDYNFICPALEFTKKFSEWGNNAFFYYFEHRSSK

SEQ ID NO: 17336 - protein, 35 aa, Artificial sequence
  synthetic peptide
GDYNFICPALEFTKKFSEWGNNAFFYYFEHRSSKL

SEQ ID NO: 17337 - protein, 35 aa, Artificial sequence
  synthetic peptide
DYNFICPALEFTKKFSEWGNNAFFYYFEHRSSKLP

SEQ ID NO: 17338 - protein, 35 aa, Artificial sequence
  synthetic peptide
YNFICPALEFTKKFSEWGNNAFFYYFEHRSSKLPW

SEQ ID NO: 17339 - protein, 35 aa, Artificial sequence
  synthetic peptide
NFICPALEFTKKFSEWGNNAFFYYFEHRSSKLPWP

SEQ ID NO: 17340 - protein, 35 aa, Artificial sequence
  synthetic peptide
FICPALEFTKKFSEWGNNAFFYYFEHRSSKLPWPE

SEQ ID NO: 17341 - protein, 35 aa, Artificial sequence
  synthetic peptide
ICPALEFTKKFSEWGNNAFFYYFEHRSSKLPWPEW

SEQ ID NO: 17342 - protein, 35 aa, Artificial sequence
  synthetic peptide
CPALEFTKKFSEWGNNAFFYYFEHRSSKLPWPEWM

SEQ ID NO: 17343 - protein, 35 aa, Artificial sequence
  synthetic peptide
PALEFTKKFSEWGNNAFFYYFEHRSSKLPWPEWMG

SEQ ID NO: 17344 - protein, 35 aa, Artificial sequence
  synthetic peptide
ALEFTKKFSEWGNNAFFYYFEHRSSKLPWPEWMGV

SEQ ID NO: 17345 - protein, 35 aa, Artificial sequence
  synthetic peptide
LEFTKKFSEWGNNAFFYYFEHRSSKLPWPEWMGVM

SEQ ID NO: 17346 - protein, 35 aa, Artificial sequence
  synthetic peptide
EFTKKFSEWGNNAFFYYFEHRSSKLPWPEWMGVMH

SEQ ID NO: 17347 - protein, 35 aa, Artificial sequence
  synthetic peptide
FTKKFSEWGNNAFFYYFEHRSSKLPWPEWMGVMHG

SEQ ID NO: 17348 - protein, 35 aa, Artificial sequence
  synthetic peptide
TKKFSEWGNNAFFYYFEHRSSKLPWPEWMGVMHGY

SEQ ID NO: 17349 - protein, 35 aa, Artificial sequence
  synthetic peptide
KKFSEWGNNAFFYYFEHRSSKLPWPEWMGVMHGYE

SEQ ID NO: 17350 - protein, 35 aa, Artificial sequence
  synthetic peptide
KFSEWGNNAFFYYFEHRSSKLPWPEWMGVMHGYEI

SEQ ID NO: 17351 - protein, 35 aa, Artificial sequence
  synthetic peptide
FSEWGNNAFFYYFEHRSSKLPWPEWMGVMHGYEIE

SEQ ID NO: 17352 - protein, 35 aa, Artificial sequence
  synthetic peptide
SEWGNNAFFYYFEHRSSKLPWPEWMGVMHGYEIEF

SEQ ID NO: 17353 - protein, 35 aa, Artificial sequence
  synthetic peptide
EWGNNAFFYYFEHRSSKLPWPEWMGVMHGYEIEFV

SEQ ID NO: 17354 - protein, 35 aa, Artificial sequence
  synthetic peptide
WGNNAFFYYFEHRSSKLPWPEWMGVMHGYEIEFVF

SEQ ID NO: 17355 - protein, 35 aa, Artificial sequence
  synthetic peptide
GNNAFFYYFEHRSSKLPWPEWMGVMHGYEIEFVFG

SEQ ID NO: 17356 - protein, 35 aa, Artificial sequence
  synthetic peptide
NNAFFYYFEHRSSKLPWPEWMGVMHGYEIEFVFGL

SEQ ID NO: 17357 - protein, 35 aa, Artificial sequence
  synthetic peptide
NAFFYYFEHRSSKLPWPEWMGVMHGYEIEFVFGLP

SEQ ID NO: 17358 - protein, 35 aa, Artificial sequence
  synthetic peptide
AFFYYFEHRSSKLPWPEWMGVMHGYEIEFVFGLPL

SEQ ID NO: 17359 - protein, 35 aa, Artificial sequence
  synthetic peptide
FFYYFEHRSSKLPWPEWMGVMHGYEIEFVFGLPLE

SEQ ID NO: 17360 - protein, 35 aa, Artificial sequence
  synthetic peptide
FYYFEHRSSKLPWPEWMGVMHGYEIEFVFGLPLER

SEQ ID NO: 17361 - protein, 35 aa, Artificial sequence
  synthetic peptide
YYFEHRSSKLPWPEWMGVMHGYEIEFVFGLPLERR

SEQ ID NO: 17362 - protein, 35 aa, Artificial sequence
  synthetic peptide
YFEHRSSKLPWPEWMGVMHGYEIEFVFGLPLERRD

SEQ ID NO: 17363 - protein, 35 aa, Artificial sequence
  synthetic peptide
FEHRSSKLPWPEWMGVMHGYEIEFVFGLPLERRDN

SEQ ID NO: 17364 - protein, 35 aa, Artificial sequence
  synthetic peptide
EHRSSKLPWPEWMGVMHGYEIEFVFGLPLERRDNY

SEQ ID NO: 17365 - protein, 35 aa, Artificial sequence
  synthetic peptide
HRSSKLPWPEWMGVMHGYEIEFVFGLPLERRDNYT

SEQ ID NO: 17366 - protein, 35 aa, Artificial sequence
  synthetic peptide
RSSKLPWPEWMGVMHGYEIEFVFGLPLERRDNYTK

SEQ ID NO: 17367 - protein, 35 aa, Artificial sequence
  synthetic peptide
SSKLPWPEWMGVMHGYEIEFVFGLPLERRDNYTKA

SEQ ID NO: 17368 - protein, 35 aa, Artificial sequence
  synthetic peptide
SKLPWPEWMGVMHGYEIEFVFGLPLERRDNYTKAE

SEQ ID NO: 17369 - protein, 35 aa, Artificial sequence
  synthetic peptide
KLPWPEWMGVMHGYEIEFVFGLPLERRDNYTKAEE

SEQ ID NO: 17370 - protein, 35 aa, Artificial sequence
  synthetic peptide
LPWPEWMGVMHGYEIEFVFGLPLERRDNYTKAEEI

SEQ ID NO: 17371 - protein, 35 aa, Artificial sequence
  synthetic peptide
PWPEWMGVMHGYEIEFVFGLPLERRDNYTKAEEIL

SEQ ID NO: 17372 - protein, 35 aa, Artificial sequence
  synthetic peptide
WPEWMGVMHGYEIEFVFGLPLERRDNYTKAEEILS

SEQ ID NO: 17373 - protein, 35 aa, Artificial sequence
  synthetic peptide
PEWMGVMHGYEIEFVFGLPLERRDNYTKAEEILSR

SEQ ID NO: 17374 - protein, 35 aa, Artificial sequence
  synthetic peptide
EWMGVMHGYEIEFVFGLPLERRDNYTKAEEILSRS

SEQ ID NO: 17375 - protein, 35 aa, Artificial sequence
  synthetic peptide
WMGVMHGYEIEFVFGLPLERRDNYTKAEEILSRSI

SEQ ID NO: 17376 - protein, 35 aa, Artificial sequence
  synthetic peptide
MGVMHGYEIEFVFGLPLERRDNYTKAEEILSRSIV

SEQ ID NO: 17377 - protein, 35 aa, Artificial sequence
  synthetic peptide
GVMHGYEIEFVFGLPLERRDNYTKAEEILSRSIVK

SEQ ID NO: 17378 - protein, 35 aa, Artificial sequence
  synthetic peptide
VMHGYEIEFVFGLPLERRDNYTKAEEILSRSIVKR

SEQ ID NO: 17379 - protein, 35 aa, Artificial sequence
  synthetic peptide
MHGYEIEFVFGLPLERRDNYTKAEEILSRSIVKRW

SEQ ID NO: 17380 - protein, 35 aa, Artificial sequence
  synthetic peptide
HGYEIEFVFGLPLERRDNYTKAEEILSRSIVKRWA

SEQ ID NO: 17381 - protein, 35 aa, Artificial sequence
  synthetic peptide
GYEIEFVFGLPLERRDNYTKAEEILSRSIVKRWAN

SEQ ID NO: 17382 - protein, 35 aa, Artificial sequence
  synthetic peptide
YEIEFVFGLPLERRDNYTKAEEILSRSIVKRWANF

SEQ ID NO: 17383 - protein, 35 aa, Artificial sequence
  synthetic peptide
EIEFVFGLPLERRDNYTKAEEILSRSIVKRWANFA

SEQ ID NO: 17384 - protein, 35 aa, Artificial sequence
  synthetic peptide
IEFVFGLPLERRDNYTKAEEILSRSIVKRWANFAK

SEQ ID NO: 17385 - protein, 35 aa, Artificial sequence
  synthetic peptide
EFVFGLPLERRDNYTKAEEILSRSIVKRWANFAKY

SEQ ID NO: 17386 - protein, 35 aa, Artificial sequence
  synthetic peptide
FVFGLPLERRDNYTKAEEILSRSIVKRWANFAKYG

SEQ ID NO: 17387 - protein, 35 aa, Artificial sequence
  synthetic peptide
VFGLPLERRDNYTKAEEILSRSIVKRWANFAKYGN

SEQ ID NO: 17388 - protein, 35 aa, Artificial sequence
  synthetic peptide
FGLPLERRDNYTKAEEILSRSIVKRWANFAKYGNP

SEQ ID NO: 17389 - protein, 35 aa, Artificial sequence
  synthetic peptide
GLPLERRDNYTKAEEILSRSIVKRWANFAKYGNPN

SEQ ID NO: 17390 - protein, 35 aa, Artificial sequence
  synthetic peptide
LPLERRDNYTKAEEILSRSIVKRWANFAKYGNPNE

SEQ ID NO: 17391 - protein, 35 aa, Artificial sequence
  synthetic peptide
PLERRDNYTKAEEILSRSIVKRWANFAKYGNPNET

SEQ ID NO: 17392 - protein, 35 aa, Artificial sequence
  synthetic peptide
LERRDNYTKAEEILSRSIVKRWANFAKYGNPNETQ

SEQ ID NO: 17393 - protein, 35 aa, Artificial sequence
  synthetic peptide
ERRDNYTKAEEILSRSIVKRWANFAKYGNPNETQN

SEQ ID NO: 17394 - protein, 35 aa, Artificial sequence
  synthetic peptide
RRDNYTKAEEILSRSIVKRWANFAKYGNPNETQNN

SEQ ID NO: 17395 - protein, 35 aa, Artificial sequence
  synthetic peptide
RDNYTKAEEILSRSIVKRWANFAKYGNPNETQNNS

SEQ ID NO: 17396 - protein, 35 aa, Artificial sequence
  synthetic peptide
DNYTKAEEILSRSIVKRWANFAKYGNPNETQNNST

SEQ ID NO: 17397 - protein, 35 aa, Artificial sequence
  synthetic peptide
NYTKAEEILSRSIVKRWANFAKYGNPNETQNNSTS

SEQ ID NO: 17398 - protein, 35 aa, Artificial sequence
  synthetic peptide
YTKAEEILSRSIVKRWANFAKYGNPNETQNNSTSW

SEQ ID NO: 17399 - protein, 35 aa, Artificial sequence
  synthetic peptide
TKAEEILSRSIVKRWANFAKYGNPNETQNNSTSWP

SEQ ID NO: 17400 - protein, 35 aa, Artificial sequence
  synthetic peptide
KAEEILSRSIVKRWANFAKYGNPNETQNNSTSWPV

SEQ ID NO: 17401 - protein, 35 aa, Artificial sequence
  synthetic peptide
AEEILSRSIVKRWANFAKYGNPNETQNNSTSWPVF

SEQ ID NO: 17402 - protein, 35 aa, Artificial sequence
  synthetic peptide
EEILSRSIVKRWANFAKYGNPNETQNNSTSWPVFK

SEQ ID NO: 17403 - protein, 35 aa, Artificial sequence
  synthetic peptide
EILSRSIVKRWANFAKYGNPNETQNNSTSWPVFKS

SEQ ID NO: 17404 - protein, 35 aa, Artificial sequence
  synthetic peptide
ILSRSIVKRWANFAKYGNPNETQNNSTSWPVFKST

SEQ ID NO: 17405 - protein, 35 aa, Artificial sequence
  synthetic peptide
LSRSIVKRWANFAKYGNPNETQNNSTSWPVFKSTE

SEQ ID NO: 17406 - protein, 35 aa, Artificial sequence
  synthetic peptide
SRSIVKRWANFAKYGNPNETQNNSTSWPVFKSTEQ

SEQ ID NO: 17407 - protein, 35 aa, Artificial sequence
  synthetic peptide
RSIVKRWANFAKYGNPNETQNNSTSWPVFKSTEQK

SEQ ID NO: 17408 - protein, 35 aa, Artificial sequence
  synthetic peptide
SIVKRWANFAKYGNPNETQNNSTSWPVFKSTEQKY

SEQ ID NO: 17409 - protein, 35 aa, Artificial sequence
  synthetic peptide
IVKRWANFAKYGNPNETQNNSTSWPVFKSTEQKYL

SEQ ID NO: 17410 - protein, 35 aa, Artificial sequence
  synthetic peptide
VKRWANFAKYGNPNETQNNSTSWPVFKSTEQKYLT

SEQ ID NO: 17411 - protein, 35 aa, Artificial sequence
  synthetic peptide
KRWANFAKYGNPNETQNNSTSWPVFKSTEQKYLTL

SEQ ID NO: 17412 - protein, 35 aa, Artificial sequence
  synthetic peptide
RWANFAKYGNPNETQNNSTSWPVFKSTEQKYLTLN

SEQ ID NO: 17413 - protein, 35 aa, Artificial sequence
  synthetic peptide
WANFAKYGNPNETQNNSTSWPVFKSTEQKYLTLNT

SEQ ID NO: 17414 - protein, 35 aa, Artificial sequence
  synthetic peptide
ANFAKYGNPNETQNNSTSWPVFKSTEQKYLTLNTE

SEQ ID NO: 17415 - protein, 35 aa, Artificial sequence
  synthetic peptide
NFAKYGNPNETQNNSTSWPVFKSTEQKYLTLNTES

SEQ ID NO: 17416 - protein, 35 aa, Artificial sequence
  synthetic peptide
FAKYGNPNETQNNSTSWPVFKSTEQKYLTLNTEST

SEQ ID NO: 17417 - protein, 35 aa, Artificial sequence
  synthetic peptide
AKYGNPNETQNNSTSWPVFKSTEQKYLTLNTESTR

SEQ ID NO: 17418 - protein, 35 aa, Artificial sequence
  synthetic peptide
KYGNPNETQNNSTSWPVFKSTEQKYLTLNTESTRI

SEQ ID NO: 17419 - protein, 35 aa, Artificial sequence
  synthetic peptide
YGNPNETQNNSTSWPVFKSTEQKYLTLNTESTRIM

SEQ ID NO: 17420 - protein, 35 aa, Artificial sequence
  synthetic peptide
GNPNETQNNSTSWPVFKSTEQKYLTLNTESTRIMT

SEQ ID NO: 17421 - protein, 35 aa, Artificial sequence
  synthetic peptide
NPNETQNNSTSWPVFKSTEQKYLTLNTESTRIMTK

SEQ ID NO: 17422 - protein, 35 aa, Artificial sequence
  synthetic peptide
PNETQNNSTSWPVFKSTEQKYLTLNTESTRIMTKL

SEQ ID NO: 17423 - protein, 35 aa, Artificial sequence
  synthetic peptide
NETQNNSTSWPVFKSTEQKYLTLNTESTRIMTKLR

SEQ ID NO: 17424 - protein, 35 aa, Artificial sequence
  synthetic peptide
ETQNNSTSWPVFKSTEQKYLTLNTESTRIMTKLRA

SEQ ID NO: 17425 - protein, 35 aa, Artificial sequence
  synthetic peptide
TQNNSTSWPVFKSTEQKYLTLNTESTRIMTKLRAQ

SEQ ID NO: 17426 - protein, 35 aa, Artificial sequence
  synthetic peptide
QNNSTSWPVFKSTEQKYLTLNTESTRIMTKLRAQQ

SEQ ID NO: 17427 - protein, 35 aa, Artificial sequence
  synthetic peptide
NNSTSWPVFKSTEQKYLTLNTESTRIMTKLRAQQC

SEQ ID NO: 17428 - protein, 35 aa, Artificial sequence
  synthetic peptide
NSTSWPVFKSTEQKYLTLNTESTRIMTKLRAQQCR

SEQ ID NO: 17429 - protein, 35 aa, Artificial sequence
  synthetic peptide
STSWPVFKSTEQKYLTLNTESTRIMTKLRAQQCRF

SEQ ID NO: 17430 - protein, 35 aa, Artificial sequence
  synthetic peptide
TSWPVFKSTEQKYLTLNTESTRIMTKLRAQQCRFW

SEQ ID NO: 17431 - protein, 35 aa, Artificial sequence
  synthetic peptide
SWPVFKSTEQKYLTLNTESTRIMTKLRAQQCRFWT

SEQ ID NO: 17432 - protein, 35 aa, Artificial sequence
  synthetic peptide
WPVFKSTEQKYLTLNTESTRIMTKLRAQQCRFWTS

SEQ ID NO: 17433 - protein, 35 aa, Artificial sequence
  synthetic peptide
PVFKSTEQKYLTLNTESTRIMTKLRAQQCRFWTSF

SEQ ID NO: 17434 - protein, 35 aa, Artificial sequence
  synthetic peptide
VFKSTEQKYLTLNTESTRIMTKLRAQQCRFWTSFF

SEQ ID NO: 17435 - protein, 35 aa, Artificial sequence
  synthetic peptide
FKSTEQKYLTLNTESTRIMTKLRAQQCRFWTSFFP

SEQ ID NO: 17436 - protein, 35 aa, Artificial sequence
  synthetic peptide
KSTEQKYLTLNTESTRIMTKLRAQQCRFWTSFFPK

SEQ ID NO: 17437 - protein, 35 aa, Artificial sequence
  synthetic peptide
STEQKYLTLNTESTRIMTKLRAQQCRFWTSFFPKV

SEQ ID NO: 17438 - protein, 35 aa, Artificial sequence
  synthetic peptide
TEQKYLTLNTESTRIMTKLRAQQCRFWTSFFPKVL

SEQ ID NO: 17439 - protein, 35 aa, Artificial sequence
  synthetic peptide
EQKYLTLNTESTRIMTKLRAQQCRFWTSFFPKVLE

SEQ ID NO: 17440 - protein, 35 aa, Artificial sequence
  synthetic peptide
QKYLTLNTESTRIMTKLRAQQCRFWTSFFPKVLEM

SEQ ID NO: 17441 - protein, 35 aa, Artificial sequence
  synthetic peptide
KYLTLNTESTRIMTKLRAQQCRFWTSFFPKVLEMT

SEQ ID NO: 17442 - protein, 35 aa, Artificial sequence
  synthetic peptide
YLTLNTESTRIMTKLRAQQCRFWTSFFPKVLEMTG

SEQ ID NO: 17443 - protein, 35 aa, Artificial sequence
  synthetic peptide
LTLNTESTRIMTKLRAQQCRFWTSFFPKVLEMTGN

SEQ ID NO: 17444 - protein, 35 aa, Artificial sequence
  synthetic peptide
TLNTESTRIMTKLRAQQCRFWTSFFPKVLEMTGNI

SEQ ID NO: 17445 - protein, 35 aa, Artificial sequence
  synthetic peptide
LNTESTRIMTKLRAQQCRFWTSFFPKVLEMTGNID

SEQ ID NO: 17446 - protein, 35 aa, Artificial sequence
  synthetic peptide
NTESTRIMTKLRAQQCRFWTSFFPKVLEMTGNIDE

SEQ ID NO: 17447 - protein, 35 aa, Artificial sequence
  synthetic peptide
TESTRIMTKLRAQQCRFWTSFFPKVLEMTGNIDEA

SEQ ID NO: 17448 - protein, 35 aa, Artificial sequence
  synthetic peptide
ESTRIMTKLRAQQCRFWTSFFPKVLEMTGNIDEAE

SEQ ID NO: 17449 - protein, 35 aa, Artificial sequence
  synthetic peptide
STRIMTKLRAQQCRFWTSFFPKVLEMTGNIDEAEW

SEQ ID NO: 17450 - protein, 35 aa, Artificial sequence
  synthetic peptide
TRIMTKLRAQQCRFWTSFFPKVLEMTGNIDEAEWE

SEQ ID NO: 17451 - protein, 35 aa, Artificial sequence
  synthetic peptide
RIMTKLRAQQCRFWTSFFPKVLEMTGNIDEAEWEW

SEQ ID NO: 17452 - protein, 35 aa, Artificial sequence
  synthetic peptide
IMTKLRAQQCRFWTSFFPKVLEMTGNIDEAEWEWK

SEQ ID NO: 17453 - protein, 35 aa, Artificial sequence
  synthetic peptide
MTKLRAQQCRFWTSFFPKVLEMTGNIDEAEWEWKA

SEQ ID NO: 17454 - protein, 35 aa, Artificial sequence
  synthetic peptide
TKLRAQQCRFWTSFFPKVLEMTGNIDEAEWEWKAG

SEQ ID NO: 17455 - protein, 35 aa, Artificial sequence
  synthetic peptide
KLRAQQCRFWTSFFPKVLEMTGNIDEAEWEWKAGF

SEQ ID NO: 17456 - protein, 35 aa, Artificial sequence
  synthetic peptide
LRAQQCRFWTSFFPKVLEMTGNIDEAEWEWKAGFH

SEQ ID NO: 17457 - protein, 35 aa, Artificial sequence
  synthetic peptide
RAQQCRFWTSFFPKVLEMTGNIDEAEWEWKAGFHR

SEQ ID NO: 17458 - protein, 35 aa, Artificial sequence
  synthetic peptide
AQQCRFWTSFFPKVLEMTGNIDEAEWEWKAGFHRW

SEQ ID NO: 17459 - protein, 35 aa, Artificial sequence
  synthetic peptide
QQCRFWTSFFPKVLEMTGNIDEAEWEWKAGFHRWN

SEQ ID NO: 17460 - protein, 35 aa, Artificial sequence
  synthetic peptide
QCRFWTSFFPKVLEMTGNIDEAEWEWKAGFHRWNN

SEQ ID NO: 17461 - protein, 35 aa, Artificial sequence
  synthetic peptide
CRFWTSFFPKVLEMTGNIDEAEWEWKAGFHRWNNY

SEQ ID NO: 17462 - protein, 35 aa, Artificial sequence
  synthetic peptide
RFWTSFFPKVLEMTGNIDEAEWEWKAGFHRWNNYM

SEQ ID NO: 17463 - protein, 35 aa, Artificial sequence
  synthetic peptide
FWTSFFPKVLEMTGNIDEAEWEWKAGFHRWNNYMM

SEQ ID NO: 17464 - protein, 35 aa, Artificial sequence
  synthetic peptide
WTSFFPKVLEMTGNIDEAEWEWKAGFHRWNNYMMD

SEQ ID NO: 17465 - protein, 35 aa, Artificial sequence
  synthetic peptide
TSFFPKVLEMTGNIDEAEWEWKAGFHRWNNYMMDW

SEQ ID NO: 17466 - protein, 35 aa, Artificial sequence
  synthetic peptide
SFFPKVLEMTGNIDEAEWEWKAGFHRWNNYMMDWK

SEQ ID NO: 17467 - protein, 35 aa, Artificial sequence
  synthetic peptide
FFPKVLEMTGNIDEAEWEWKAGFHRWNNYMMDWKN

SEQ ID NO: 17468 - protein, 35 aa, Artificial sequence
  synthetic peptide
FPKVLEMTGNIDEAEWEWKAGFHRWNNYMMDWKNQ

SEQ ID NO: 17469 - protein, 35 aa, Artificial sequence
  synthetic peptide
PKVLEMTGNIDEAEWEWKAGFHRWNNYMMDWKNQF

SEQ ID NO: 17470 - protein, 35 aa, Artificial sequence
  synthetic peptide
KVLEMTGNIDEAEWEWKAGFHRWNNYMMDWKNQFN

SEQ ID NO: 17471 - protein, 35 aa, Artificial sequence
  synthetic peptide
VLEMTGNIDEAEWEWKAGFHRWNNYMMDWKNQFND

SEQ ID NO: 17472 - protein, 35 aa, Artificial sequence
  synthetic peptide
LEMTGNIDEAEWEWKAGFHRWNNYMMDWKNQFNDY

SEQ ID NO: 17473 - protein, 35 aa, Artificial sequence
  synthetic peptide
EMTGNIDEAEWEWKAGFHRWNNYMMDWKNQFNDYT

SEQ ID NO: 17474 - protein, 35 aa, Artificial sequence
  synthetic peptide
MTGNIDEAEWEWKAGFHRWNNYMMDWKNQFNDYTS

SEQ ID NO: 17475 - protein, 35 aa, Artificial sequence
  synthetic peptide
TGNIDEAEWEWKAGFHRWNNYMMDWKNQFNDYTSK

SEQ ID NO: 17476 - protein, 35 aa, Artificial sequence
  synthetic peptide
GNIDEAEWEWKAGFHRWNNYMMDWKNQFNDYTSKK

SEQ ID NO: 17477 - protein, 35 aa, Artificial sequence
  synthetic peptide
NIDEAEWEWKAGFHRWNNYMMDWKNQFNDYTSKKE

SEQ ID NO: 17478 - protein, 35 aa, Artificial sequence
  synthetic peptide
IDEAEWEWKAGFHRWNNYMMDWKNQFNDYTSKKES

SEQ ID NO: 17479 - protein, 35 aa, Artificial sequence
  synthetic peptide
DEAEWEWKAGFHRWNNYMMDWKNQFNDYTSKKESC

SEQ ID NO: 17480 - protein, 35 aa, Artificial sequence
  synthetic peptide
EAEWEWKAGFHRWNNYMMDWKNQFNDYTSKKESCV

SEQ ID NO: 17481 - protein, 35 aa, Artificial sequence
  synthetic peptide
AEWEWKAGFHRWNNYMMDWKNQFNDYTSKKESCVG

SEQ ID NO: 17482 - protein, 35 aa, Artificial sequence
  synthetic peptide
EWEWKAGFHRWNNYMMDWKNQFNDYTSKKESCVGL

SEQ ID NO: 17483 - protein, 36 aa, Artificial sequence
  synthetic peptide
MHSKVTIICIRFLFWFLLLCMLIGKSHTEDDIIIAT

SEQ ID NO: 17484 - protein, 36 aa, Artificial sequence
  synthetic peptide
HSKVTIICIRFLFWFLLLCMLIGKSHTEDDIIIATK

SEQ ID NO: 17485 - protein, 36 aa, Artificial sequence
  synthetic peptide
SKVTIICIRFLFWFLLLCMLIGKSHTEDDIIIATKN

SEQ ID NO: 17486 - protein, 36 aa, Artificial sequence
  synthetic peptide
KVTIICIRFLFWFLLLCMLIGKSHTEDDIIIATKNG

SEQ ID NO: 17487 - protein, 36 aa, Artificial sequence
  synthetic peptide
VTIICIRFLFWFLLLCMLIGKSHTEDDIIIATKNGK

SEQ ID NO: 17488 - protein, 36 aa, Artificial sequence
  synthetic peptide
TIICIRFLFWFLLLCMLIGKSHTEDDIIIATKNGKV

SEQ ID NO: 17489 - protein, 36 aa, Artificial sequence
  synthetic peptide
IICIRFLFWFLLLCMLIGKSHTEDDIIIATKNGKVR

SEQ ID NO: 17490 - protein, 36 aa, Artificial sequence
  synthetic peptide
ICIRFLFWFLLLCMLIGKSHTEDDIIIATKNGKVRG

SEQ ID NO: 17491 - protein, 36 aa, Artificial sequence
  synthetic peptide
CIRFLFWFLLLCMLIGKSHTEDDIIIATKNGKVRGM

SEQ ID NO: 17492 - protein, 36 aa, Artificial sequence
  synthetic peptide
IRFLFWFLLLCMLIGKSHTEDDIIIATKNGKVRGMN

SEQ ID NO: 17493 - protein, 36 aa, Artificial sequence
  synthetic peptide
RFLFWFLLLCMLIGKSHTEDDIIIATKNGKVRGMNL

SEQ ID NO: 17494 - protein, 36 aa, Artificial sequence
  synthetic peptide
FLFWFLLLCMLIGKSHTEDDIIIATKNGKVRGMNLT

SEQ ID NO: 17495 - protein, 36 aa, Artificial sequence
  synthetic peptide
LFWFLLLCMLIGKSHTEDDIIIATKNGKVRGMNLTV

SEQ ID NO: 17496 - protein, 36 aa, Artificial sequence
  synthetic peptide
FWFLLLCMLIGKSHTEDDIIIATKNGKVRGMNLTVF

SEQ ID NO: 17497 - protein, 36 aa, Artificial sequence
  synthetic peptide
WFLLLCMLIGKSHTEDDIIIATKNGKVRGMNLTVFG

SEQ ID NO: 17498 - protein, 36 aa, Artificial sequence
  synthetic peptide
FLLLCMLIGKSHTEDDIIIATKNGKVRGMNLTVFGG

SEQ ID NO: 17499 - protein, 36 aa, Artificial sequence
  synthetic peptide
LLLCMLIGKSHTEDDIIIATKNGKVRGMNLTVFGGT

SEQ ID NO: 17500 - protein, 36 aa, Artificial sequence
  synthetic peptide
LLCMLIGKSHTEDDIIIATKNGKVRGMNLTVFGGTV

SEQ ID NO: 17501 - protein, 36 aa, Artificial sequence
  synthetic peptide
LCMLIGKSHTEDDIIIATKNGKVRGMNLTVFGGTVT

SEQ ID NO: 17502 - protein, 36 aa, Artificial sequence
  synthetic peptide
CMLIGKSHTEDDIIIATKNGKVRGMNLTVFGGTVTA

SEQ ID NO: 17503 - protein, 36 aa, Artificial sequence
  synthetic peptide
MLIGKSHTEDDIIIATKNGKVRGMNLTVFGGTVTAF

SEQ ID NO: 17504 - protein, 36 aa, Artificial sequence
  synthetic peptide
LIGKSHTEDDIIIATKNGKVRGMNLTVFGGTVTAFL

SEQ ID NO: 17505 - protein, 36 aa, Artificial sequence
  synthetic peptide
IGKSHTEDDIIIATKNGKVRGMNLTVFGGTVTAFLG

SEQ ID NO: 17506 - protein, 36 aa, Artificial sequence
  synthetic peptide
GKSHTEDDIIIATKNGKVRGMNLTVFGGTVTAFLGI

SEQ ID NO: 17507 - protein, 36 aa, Artificial sequence
  synthetic peptide
KSHTEDDIIIATKNGKVRGMNLTVFGGTVTAFLGIP

SEQ ID NO: 17508 - protein, 36 aa, Artificial sequence
  synthetic peptide
SHTEDDIIIATKNGKVRGMNLTVFGGTVTAFLGIPY

SEQ ID NO: 17509 - protein, 36 aa, Artificial sequence
  synthetic peptide
HTEDDIIIATKNGKVRGMNLTVFGGTVTAFLGIPYA

SEQ ID NO: 17510 - protein, 36 aa, Artificial sequence
  synthetic peptide
TEDDIIIATKNGKVRGMNLTVFGGTVTAFLGIPYAQ

SEQ ID NO: 17511 - protein, 36 aa, Artificial sequence
  synthetic peptide
EDDIIIATKNGKVRGMNLTVFGGTVTAFLGIPYAQP

SEQ ID NO: 17512 - protein, 36 aa, Artificial sequence
  synthetic peptide
DDIIIATKNGKVRGMNLTVFGGTVTAFLGIPYAQPP

SEQ ID NO: 17513 - protein, 36 aa, Artificial sequence
  synthetic peptide
DIIIATKNGKVRGMNLTVFGGTVTAFLGIPYAQPPL

SEQ ID NO: 17514 - protein, 36 aa, Artificial sequence
  synthetic peptide
IIIATKNGKVRGMNLTVFGGTVTAFLGIPYAQPPLG

SEQ ID NO: 17515 - protein, 36 aa, Artificial sequence
  synthetic peptide
IIATKNGKVRGMNLTVFGGTVTAFLGIPYAQPPLGR

SEQ ID NO: 17516 - protein, 36 aa, Artificial sequence
  synthetic peptide
IATKNGKVRGMNLTVFGGTVTAFLGIPYAQPPLGRL

SEQ ID NO: 17517 - protein, 36 aa, Artificial sequence
  synthetic peptide
ATKNGKVRGMNLTVFGGTVTAFLGIPYAQPPLGRLR

SEQ ID NO: 17518 - protein, 36 aa, Artificial sequence
  synthetic peptide
TKNGKVRGMNLTVFGGTVTAFLGIPYAQPPLGRLRF

SEQ ID NO: 17519 - protein, 36 aa, Artificial sequence
  synthetic peptide
KNGKVRGMNLTVFGGTVTAFLGIPYAQPPLGRLRFK

SEQ ID NO: 17520 - protein, 36 aa, Artificial sequence
  synthetic peptide
NGKVRGMNLTVFGGTVTAFLGIPYAQPPLGRLRFKK

SEQ ID NO: 17521 - protein, 36 aa, Artificial sequence
  synthetic peptide
GKVRGMNLTVFGGTVTAFLGIPYAQPPLGRLRFKKP

SEQ ID NO: 17522 - protein, 36 aa, Artificial sequence
  synthetic peptide
KVRGMNLTVFGGTVTAFLGIPYAQPPLGRLRFKKPQ

SEQ ID NO: 17523 - protein, 36 aa, Artificial sequence
  synthetic peptide
VRGMNLTVFGGTVTAFLGIPYAQPPLGRLRFKKPQS

SEQ ID NO: 17524 - protein, 36 aa, Artificial sequence
  synthetic peptide
RGMNLTVFGGTVTAFLGIPYAQPPLGRLRFKKPQSL

SEQ ID NO: 17525 - protein, 36 aa, Artificial sequence
  synthetic peptide
GMNLTVFGGTVTAFLGIPYAQPPLGRLRFKKPQSLT

SEQ ID NO: 17526 - protein, 36 aa, Artificial sequence
  synthetic peptide
MNLTVFGGTVTAFLGIPYAQPPLGRLRFKKPQSLTK

SEQ ID NO: 17527 - protein, 36 aa, Artificial sequence
  synthetic peptide
NLTVFGGTVTAFLGIPYAQPPLGRLRFKKPQSLTKW

SEQ ID NO: 17528 - protein, 36 aa, Artificial sequence
  synthetic peptide
LTVFGGTVTAFLGIPYAQPPLGRLRFKKPQSLTKWS

SEQ ID NO: 17529 - protein, 36 aa, Artificial sequence
  synthetic peptide
TVFGGTVTAFLGIPYAQPPLGRLRFKKPQSLTKWSD

SEQ ID NO: 17530 - protein, 36 aa, Artificial sequence
  synthetic peptide
VFGGTVTAFLGIPYAQPPLGRLRFKKPQSLTKWSDI

SEQ ID NO: 17531 - protein, 36 aa, Artificial sequence
  synthetic peptide
FGGTVTAFLGIPYAQPPLGRLRFKKPQSLTKWSDIW

SEQ ID NO: 17532 - protein, 36 aa, Artificial sequence
  synthetic peptide
GGTVTAFLGIPYAQPPLGRLRFKKPQSLTKWSDIWN

SEQ ID NO: 17533 - protein, 36 aa, Artificial sequence
  synthetic peptide
GTVTAFLGIPYAQPPLGRLRFKKPQSLTKWSDIWNA

SEQ ID NO: 17534 - protein, 36 aa, Artificial sequence
  synthetic peptide
TVTAFLGIPYAQPPLGRLRFKKPQSLTKWSDIWNAT

SEQ ID NO: 17535 - protein, 36 aa, Artificial sequence
  synthetic peptide
VTAFLGIPYAQPPLGRLRFKKPQSLTKWSDIWNATK

SEQ ID NO: 17536 - protein, 36 aa, Artificial sequence
  synthetic peptide
TAFLGIPYAQPPLGRLRFKKPQSLTKWSDIWNATKY

SEQ ID NO: 17537 - protein, 36 aa, Artificial sequence
  synthetic peptide
AFLGIPYAQPPLGRLRFKKPQSLTKWSDIWNATKYA

SEQ ID NO: 17538 - protein, 36 aa, Artificial sequence
  synthetic peptide
FLGIPYAQPPLGRLRFKKPQSLTKWSDIWNATKYAN

SEQ ID NO: 17539 - protein, 36 aa, Artificial sequence
  synthetic peptide
LGIPYAQPPLGRLRFKKPQSLTKWSDIWNATKYANS

SEQ ID NO: 17540 - protein, 36 aa, Artificial sequence
  synthetic peptide
GIPYAQPPLGRLRFKKPQSLTKWSDIWNATKYANSC

SEQ ID NO: 17541 - protein, 36 aa, Artificial sequence
  synthetic peptide
IPYAQPPLGRLRFKKPQSLTKWSDIWNATKYANSCC

SEQ ID NO: 17542 - protein, 36 aa, Artificial sequence
  synthetic peptide
PYAQPPLGRLRFKKPQSLTKWSDIWNATKYANSCCQ

SEQ ID NO: 17543 - protein, 36 aa, Artificial sequence
  synthetic peptide
YAQPPLGRLRFKKPQSLTKWSDIWNATKYANSCCQN

SEQ ID NO: 17544 - protein, 36 aa, Artificial sequence
  synthetic peptide
AQPPLGRLRFKKPQSLTKWSDIWNATKYANSCCQNI

SEQ ID NO: 17545 - protein, 36 aa, Artificial sequence
  synthetic peptide
QPPLGRLRFKKPQSLTKWSDIWNATKYANSCCQNID

SEQ ID NO: 17546 - protein, 36 aa, Artificial sequence
  synthetic peptide
PPLGRLRFKKPQSLTKWSDIWNATKYANSCCQNIDQ

SEQ ID NO: 17547 - protein, 36 aa, Artificial sequence
  synthetic peptide
PLGRLRFKKPQSLTKWSDIWNATKYANSCCQNIDQS

SEQ ID NO: 17548 - protein, 36 aa, Artificial sequence
  synthetic peptide
LGRLRFKKPQSLTKWSDIWNATKYANSCCQNIDQSF

SEQ ID NO: 17549 - protein, 36 aa, Artificial sequence
  synthetic peptide
GRLRFKKPQSLTKWSDIWNATKYANSCCQNIDQSFP

SEQ ID NO: 17550 - protein, 36 aa, Artificial sequence
  synthetic peptide
RLRFKKPQSLTKWSDIWNATKYANSCCQNIDQSFPG

SEQ ID NO: 17551 - protein, 36 aa, Artificial sequence
  synthetic peptide
LRFKKPQSLTKWSDIWNATKYANSCCQNIDQSFPGF

SEQ ID NO: 17552 - protein, 36 aa, Artificial sequence
  synthetic peptide
RFKKPQSLTKWSDIWNATKYANSCCQNIDQSFPGFH

SEQ ID NO: 17553 - protein, 36 aa, Artificial sequence
  synthetic peptide
FKKPQSLTKWSDIWNATKYANSCCQNIDQSFPGFHG

SEQ ID NO: 17554 - protein, 36 aa, Artificial sequence
  synthetic peptide
KKPQSLTKWSDIWNATKYANSCCQNIDQSFPGFHGS

SEQ ID NO: 17555 - protein, 36 aa, Artificial sequence
  synthetic peptide
KPQSLTKWSDIWNATKYANSCCQNIDQSFPGFHGSE

SEQ ID NO: 17556 - protein, 36 aa, Artificial sequence
  synthetic peptide
PQSLTKWSDIWNATKYANSCCQNIDQSFPGFHGSEM

SEQ ID NO: 17557 - protein, 36 aa, Artificial sequence
  synthetic peptide
QSLTKWSDIWNATKYANSCCQNIDQSFPGFHGSEMW

SEQ ID NO: 17558 - protein, 36 aa, Artificial sequence
  synthetic peptide
SLTKWSDIWNATKYANSCCQNIDQSFPGFHGSEMWN

SEQ ID NO: 17559 - protein, 36 aa, Artificial sequence
  synthetic peptide
LTKWSDIWNATKYANSCCQNIDQSFPGFHGSEMWNP

SEQ ID NO: 17560 - protein, 36 aa, Artificial sequence
  synthetic peptide
TKWSDIWNATKYANSCCQNIDQSFPGFHGSEMWNPN

SEQ ID NO: 17561 - protein, 36 aa, Artificial sequence
  synthetic peptide
KWSDIWNATKYANSCCQNIDQSFPGFHGSEMWNPNT

SEQ ID NO: 17562 - protein, 36 aa, Artificial sequence
  synthetic peptide
WSDIWNATKYANSCCQNIDQSFPGFHGSEMWNPNTD

SEQ ID NO: 17563 - protein, 36 aa, Artificial sequence
  synthetic peptide
SDIWNATKYANSCCQNIDQSFPGFHGSEMWNPNTDL

SEQ ID NO: 17564 - protein, 36 aa, Artificial sequence
  synthetic peptide
DIWNATKYANSCCQNIDQSFPGFHGSEMWNPNTDLS

SEQ ID NO: 17565 - protein, 36 aa, Artificial sequence
  synthetic peptide
IWNATKYANSCCQNIDQSFPGFHGSEMWNPNTDLSE

SEQ ID NO: 17566 - protein, 36 aa, Artificial sequence
  synthetic peptide
WNATKYANSCCQNIDQSFPGFHGSEMWNPNTDLSED

SEQ ID NO: 17567 - protein, 36 aa, Artificial sequence
  synthetic peptide
NATKYANSCCQNIDQSFPGFHGSEMWNPNTDLSEDC

SEQ ID NO: 17568 - protein, 36 aa, Artificial sequence
  synthetic peptide
ATKYANSCCQNIDQSFPGFHGSEMWNPNTDLSEDCL

SEQ ID NO: 17569 - protein, 36 aa, Artificial sequence
  synthetic peptide
TKYANSCCQNIDQSFPGFHGSEMWNPNTDLSEDCLY

SEQ ID NO: 17570 - protein, 36 aa, Artificial sequence
  synthetic peptide
KYANSCCQNIDQSFPGFHGSEMWNPNTDLSEDCLYL

SEQ ID NO: 17571 - protein, 36 aa, Artificial sequence
  synthetic peptide
YANSCCQNIDQSFPGFHGSEMWNPNTDLSEDCLYLN

SEQ ID NO: 17572 - protein, 36 aa, Artificial sequence
  synthetic peptide
ANSCCQNIDQSFPGFHGSEMWNPNTDLSEDCLYLNV

SEQ ID NO: 17573 - protein, 36 aa, Artificial sequence
  synthetic peptide
NSCCQNIDQSFPGFHGSEMWNPNTDLSEDCLYLNVW

SEQ ID NO: 17574 - protein, 36 aa, Artificial sequence
  synthetic peptide
SCCQNIDQSFPGFHGSEMWNPNTDLSEDCLYLNVWI

SEQ ID NO: 17575 - protein, 36 aa, Artificial sequence
  synthetic peptide
CCQNIDQSFPGFHGSEMWNPNTDLSEDCLYLNVWIP

SEQ ID NO: 17576 - protein, 36 aa, Artificial sequence
  synthetic peptide
CQNIDQSFPGFHGSEMWNPNTDLSEDCLYLNVWIPA

SEQ ID NO: 17577 - protein, 36 aa, Artificial sequence
  synthetic peptide
QNIDQSFPGFHGSEMWNPNTDLSEDCLYLNVWIPAP

SEQ ID NO: 17578 - protein, 36 aa, Artificial sequence
  synthetic peptide
NIDQSFPGFHGSEMWNPNTDLSEDCLYLNVWIPAPK

SEQ ID NO: 17579 - protein, 36 aa, Artificial sequence
  synthetic peptide
IDQSFPGFHGSEMWNPNTDLSEDCLYLNVWIPAPKP

SEQ ID NO: 17580 - protein, 36 aa, Artificial sequence
  synthetic peptide
DQSFPGFHGSEMWNPNTDLSEDCLYLNVWIPAPKPK

SEQ ID NO: 17581 - protein, 36 aa, Artificial sequence
  synthetic peptide
QSFPGFHGSEMWNPNTDLSEDCLYLNVWIPAPKPKN

SEQ ID NO: 17582 - protein, 36 aa, Artificial sequence
  synthetic peptide
SFPGFHGSEMWNPNTDLSEDCLYLNVWIPAPKPKNA

SEQ ID NO: 17583 - protein, 36 aa, Artificial sequence
  synthetic peptide
FPGFHGSEMWNPNTDLSEDCLYLNVWIPAPKPKNAT

SEQ ID NO: 17584 - protein, 36 aa, Artificial sequence
  synthetic peptide
PGFHGSEMWNPNTDLSEDCLYLNVWIPAPKPKNATV

SEQ ID NO: 17585 - protein, 36 aa, Artificial sequence
  synthetic peptide
GFHGSEMWNPNTDLSEDCLYLNVWIPAPKPKNATVL

SEQ ID NO: 17586 - protein, 36 aa, Artificial sequence
  synthetic peptide
FHGSEMWNPNTDLSEDCLYLNVWIPAPKPKNATVLI

SEQ ID NO: 17587 - protein, 36 aa, Artificial sequence
  synthetic peptide
HGSEMWNPNTDLSEDCLYLNVWIPAPKPKNATVLIW

SEQ ID NO: 17588 - protein, 36 aa, Artificial sequence
  synthetic peptide
GSEMWNPNTDLSEDCLYLNVWIPAPKPKNATVLIWI

SEQ ID NO: 17589 - protein, 36 aa, Artificial sequence
  synthetic peptide
SEMWNPNTDLSEDCLYLNVWIPAPKPKNATVLIWIY

SEQ ID NO: 17590 - protein, 36 aa, Artificial sequence
  synthetic peptide
EMWNPNTDLSEDCLYLNVWIPAPKPKNATVLIWIYG

SEQ ID NO: 17591 - protein, 36 aa, Artificial sequence
  synthetic peptide
MWNPNTDLSEDCLYLNVWIPAPKPKNATVLIWIYGG

SEQ ID NO: 17592 - protein, 36 aa, Artificial sequence
  synthetic peptide
WNPNTDLSEDCLYLNVWIPAPKPKNATVLIWIYGGG

SEQ ID NO: 17593 - protein, 36 aa, Artificial sequence
  synthetic peptide
NPNTDLSEDCLYLNVWIPAPKPKNATVLIWIYGGGF

SEQ ID NO: 17594 - protein, 36 aa, Artificial sequence
  synthetic peptide
PNTDLSEDCLYLNVWIPAPKPKNATVLIWIYGGGFQ

SEQ ID NO: 17595 - protein, 36 aa, Artificial sequence
  synthetic peptide
NTDLSEDCLYLNVWIPAPKPKNATVLIWIYGGGFQT

SEQ ID NO: 17596 - protein, 36 aa, Artificial sequence
  synthetic peptide
TDLSEDCLYLNVWIPAPKPKNATVLIWIYGGGFQTG

SEQ ID NO: 17597 - protein, 36 aa, Artificial sequence
  synthetic peptide
DLSEDCLYLNVWIPAPKPKNATVLIWIYGGGFQTGT

SEQ ID NO: 17598 - protein, 36 aa, Artificial sequence
  synthetic peptide
LSEDCLYLNVWIPAPKPKNATVLIWIYGGGFQTGTS

SEQ ID NO: 17599 - protein, 36 aa, Artificial sequence
  synthetic peptide
SEDCLYLNVWIPAPKPKNATVLIWIYGGGFQTGTSS

SEQ ID NO: 17600 - protein, 36 aa, Artificial sequence
  synthetic peptide
EDCLYLNVWIPAPKPKNATVLIWIYGGGFQTGTSSL

SEQ ID NO: 17601 - protein, 36 aa, Artificial sequence
  synthetic peptide
DCLYLNVWIPAPKPKNATVLIWIYGGGFQTGTSSLH

SEQ ID NO: 17602 - protein, 36 aa, Artificial sequence
  synthetic peptide
CLYLNVWIPAPKPKNATVLIWIYGGGFQTGTSSLHV

SEQ ID NO: 17603 - protein, 36 aa, Artificial sequence
  synthetic peptide
LYLNVWIPAPKPKNATVLIWIYGGGFQTGTSSLHVY

SEQ ID NO: 17604 - protein, 36 aa, Artificial sequence
  synthetic peptide
YLNVWIPAPKPKNATVLIWIYGGGFQTGTSSLHVYD

SEQ ID NO: 17605 - protein, 36 aa, Artificial sequence
  synthetic peptide
LNVWIPAPKPKNATVLIWIYGGGFQTGTSSLHVYDG

SEQ ID NO: 17606 - protein, 36 aa, Artificial sequence
  synthetic peptide
NVWIPAPKPKNATVLIWIYGGGFQTGTSSLHVYDGK

SEQ ID NO: 17607 - protein, 36 aa, Artificial sequence
  synthetic peptide
VWIPAPKPKNATVLIWIYGGGFQTGTSSLHVYDGKF

SEQ ID NO: 17608 - protein, 36 aa, Artificial sequence
  synthetic peptide
WIPAPKPKNATVLIWIYGGGFQTGTSSLHVYDGKFL

SEQ ID NO: 17609 - protein, 36 aa, Artificial sequence
  synthetic peptide
IPAPKPKNATVLIWIYGGGFQTGTSSLHVYDGKFLA

SEQ ID NO: 17610 - protein, 36 aa, Artificial sequence
  synthetic peptide
PAPKPKNATVLIWIYGGGFQTGTSSLHVYDGKFLAR

SEQ ID NO: 17611 - protein, 36 aa, Artificial sequence
  synthetic peptide
APKPKNATVLIWIYGGGFQTGTSSLHVYDGKFLARV

SEQ ID NO: 17612 - protein, 36 aa, Artificial sequence
  synthetic peptide
PKPKNATVLIWIYGGGFQTGTSSLHVYDGKFLARVE

SEQ ID NO: 17613 - protein, 36 aa, Artificial sequence
  synthetic peptide
KPKNATVLIWIYGGGFQTGTSSLHVYDGKFLARVER

SEQ ID NO: 17614 - protein, 36 aa, Artificial sequence
  synthetic peptide
PKNATVLIWIYGGGFQTGTSSLHVYDGKFLARVERV

SEQ ID NO: 17615 - protein, 36 aa, Artificial sequence
  synthetic peptide
KNATVLIWIYGGGFQTGTSSLHVYDGKFLARVERVI

SEQ ID NO: 17616 - protein, 36 aa, Artificial sequence
  synthetic peptide
NATVLIWIYGGGFQTGTSSLHVYDGKFLARVERVIV

SEQ ID NO: 17617 - protein, 36 aa, Artificial sequence
  synthetic peptide
ATVLIWIYGGGFQTGTSSLHVYDGKFLARVERVIVV

SEQ ID NO: 17618 - protein, 36 aa, Artificial sequence
  synthetic peptide
TVLIWIYGGGFQTGTSSLHVYDGKFLARVERVIVVS

SEQ ID NO: 17619 - protein, 36 aa, Artificial sequence
  synthetic peptide
VLIWIYGGGFQTGTSSLHVYDGKFLARVERVIVVSM

SEQ ID NO: 17620 - protein, 36 aa, Artificial sequence
  synthetic peptide
LIWIYGGGFQTGTSSLHVYDGKFLARVERVIVVSMN

SEQ ID NO: 17621 - protein, 36 aa, Artificial sequence
  synthetic peptide
IWIYGGGFQTGTSSLHVYDGKFLARVERVIVVSMNY

SEQ ID NO: 17622 - protein, 36 aa, Artificial sequence
  synthetic peptide
WIYGGGFQTGTSSLHVYDGKFLARVERVIVVSMNYR

SEQ ID NO: 17623 - protein, 36 aa, Artificial sequence
  synthetic peptide
IYGGGFQTGTSSLHVYDGKFLARVERVIVVSMNYRV

SEQ ID NO: 17624 - protein, 36 aa, Artificial sequence
  synthetic peptide
YGGGFQTGTSSLHVYDGKFLARVERVIVVSMNYRVG

SEQ ID NO: 17625 - protein, 36 aa, Artificial sequence
  synthetic peptide
GGGFQTGTSSLHVYDGKFLARVERVIVVSMNYRVGA

SEQ ID NO: 17626 - protein, 36 aa, Artificial sequence
  synthetic peptide
GGFQTGTSSLHVYDGKFLARVERVIVVSMNYRVGAL

SEQ ID NO: 17627 - protein, 36 aa, Artificial sequence
  synthetic peptide
GFQTGTSSLHVYDGKFLARVERVIVVSMNYRVGALG

SEQ ID NO: 17628 - protein, 36 aa, Artificial sequence
  synthetic peptide
FQTGTSSLHVYDGKFLARVERVIVVSMNYRVGALGF

SEQ ID NO: 17629 - protein, 36 aa, Artificial sequence
  synthetic peptide
QTGTSSLHVYDGKFLARVERVIVVSMNYRVGALGFL

SEQ ID NO: 17630 - protein, 36 aa, Artificial sequence
  synthetic peptide
TGTSSLHVYDGKFLARVERVIVVSMNYRVGALGFLA

SEQ ID NO: 17631 - protein, 36 aa, Artificial sequence
  synthetic peptide
GTSSLHVYDGKFLARVERVIVVSMNYRVGALGFLAL

SEQ ID NO: 17632 - protein, 36 aa, Artificial sequence
  synthetic peptide
TSSLHVYDGKFLARVERVIVVSMNYRVGALGFLALP

SEQ ID NO: 17633 - protein, 36 aa, Artificial sequence
  synthetic peptide
SSLHVYDGKFLARVERVIVVSMNYRVGALGFLALPG

SEQ ID NO: 17634 - protein, 36 aa, Artificial sequence
  synthetic peptide
SLHVYDGKFLARVERVIVVSMNYRVGALGFLALPGN

SEQ ID NO: 17635 - protein, 36 aa, Artificial sequence
  synthetic peptide
LHVYDGKFLARVERVIVVSMNYRVGALGFLALPGNP

SEQ ID NO: 17636 - protein, 36 aa, Artificial sequence
  synthetic peptide
HVYDGKFLARVERVIVVSMNYRVGALGFLALPGNPE

SEQ ID NO: 17637 - protein, 36 aa, Artificial sequence
  synthetic peptide
VYDGKFLARVERVIVVSMNYRVGALGFLALPGNPEA

SEQ ID NO: 17638 - protein, 36 aa, Artificial sequence
  synthetic peptide
YDGKFLARVERVIVVSMNYRVGALGFLALPGNPEAP

SEQ ID NO: 17639 - protein, 36 aa, Artificial sequence
  synthetic peptide
DGKFLARVERVIVVSMNYRVGALGFLALPGNPEAPG

SEQ ID NO: 17640 - protein, 36 aa, Artificial sequence
  synthetic peptide
GKFLARVERVIVVSMNYRVGALGFLALPGNPEAPGN

SEQ ID NO: 17641 - protein, 36 aa, Artificial sequence
  synthetic peptide
KFLARVERVIVVSMNYRVGALGFLALPGNPEAPGNM

SEQ ID NO: 17642 - protein, 36 aa, Artificial sequence
  synthetic peptide
FLARVERVIVVSMNYRVGALGFLALPGNPEAPGNMG

SEQ ID NO: 17643 - protein, 36 aa, Artificial sequence
  synthetic peptide
LARVERVIVVSMNYRVGALGFLALPGNPEAPGNMGL

SEQ ID NO: 17644 - protein, 36 aa, Artificial sequence
  synthetic peptide
ARVERVIVVSMNYRVGALGFLALPGNPEAPGNMGLF

SEQ ID NO: 17645 - protein, 36 aa, Artificial sequence
  synthetic peptide
RVERVIVVSMNYRVGALGFLALPGNPEAPGNMGLFD

SEQ ID NO: 17646 - protein, 36 aa, Artificial sequence
  synthetic peptide
VERVIVVSMNYRVGALGFLALPGNPEAPGNMGLFDQ

SEQ ID NO: 17647 - protein, 36 aa, Artificial sequence
  synthetic peptide
ERVIVVSMNYRVGALGFLALPGNPEAPGNMGLFDQQ

SEQ ID NO: 17648 - protein, 36 aa, Artificial sequence
  synthetic peptide
RVIVVSMNYRVGALGFLALPGNPEAPGNMGLFDQQL

SEQ ID NO: 17649 - protein, 36 aa, Artificial sequence
  synthetic peptide
VIVVSMNYRVGALGFLALPGNPEAPGNMGLFDQQLA

SEQ ID NO: 17650 - protein, 36 aa, Artificial sequence
  synthetic peptide
IVVSMNYRVGALGFLALPGNPEAPGNMGLFDQQLAL

SEQ ID NO: 17651 - protein, 36 aa, Artificial sequence
  synthetic peptide
VVSMNYRVGALGFLALPGNPEAPGNMGLFDQQLALQ

SEQ ID NO: 17652 - protein, 36 aa, Artificial sequence
  synthetic peptide
VSMNYRVGALGFLALPGNPEAPGNMGLFDQQLALQW

SEQ ID NO: 17653 - protein, 36 aa, Artificial sequence
  synthetic peptide
SMNYRVGALGFLALPGNPEAPGNMGLFDQQLALQWV

SEQ ID NO: 17654 - protein, 36 aa, Artificial sequence
  synthetic peptide
MNYRVGALGFLALPGNPEAPGNMGLFDQQLALQWVQ

SEQ ID NO: 17655 - protein, 36 aa, Artificial sequence
  synthetic peptide
NYRVGALGFLALPGNPEAPGNMGLFDQQLALQWVQK

SEQ ID NO: 17656 - protein, 36 aa, Artificial sequence
  synthetic peptide
YRVGALGFLALPGNPEAPGNMGLFDQQLALQWVQKN

SEQ ID NO: 17657 - protein, 36 aa, Artificial sequence
  synthetic peptide
RVGALGFLALPGNPEAPGNMGLFDQQLALQWVQKNI

SEQ ID NO: 17658 - protein, 36 aa, Artificial sequence
  synthetic peptide
VGALGFLALPGNPEAPGNMGLFDQQLALQWVQKNIA

SEQ ID NO: 17659 - protein, 36 aa, Artificial sequence
  synthetic peptide
GALGFLALPGNPEAPGNMGLFDQQLALQWVQKNIAA

SEQ ID NO: 17660 - protein, 36 aa, Artificial sequence
  synthetic peptide
ALGFLALPGNPEAPGNMGLFDQQLALQWVQKNIAAF

SEQ ID NO: 17661 - protein, 36 aa, Artificial sequence
  synthetic peptide
LGFLALPGNPEAPGNMGLFDQQLALQWVQKNIAAFG

SEQ ID NO: 17662 - protein, 36 aa, Artificial sequence
  synthetic peptide
GFLALPGNPEAPGNMGLFDQQLALQWVQKNIAAFGG

SEQ ID NO: 17663 - protein, 36 aa, Artificial sequence
  synthetic peptide
FLALPGNPEAPGNMGLFDQQLALQWVQKNIAAFGGN

SEQ ID NO: 17664 - protein, 36 aa, Artificial sequence
  synthetic peptide
LALPGNPEAPGNMGLFDQQLALQWVQKNIAAFGGNP

SEQ ID NO: 17665 - protein, 36 aa, Artificial sequence
  synthetic peptide
ALPGNPEAPGNMGLFDQQLALQWVQKNIAAFGGNPK

SEQ ID NO: 17666 - protein, 36 aa, Artificial sequence
  synthetic peptide
LPGNPEAPGNMGLFDQQLALQWVQKNIAAFGGNPKS

SEQ ID NO: 17667 - protein, 36 aa, Artificial sequence
  synthetic peptide
PGNPEAPGNMGLFDQQLALQWVQKNIAAFGGNPKSV

SEQ ID NO: 17668 - protein, 36 aa, Artificial sequence
  synthetic peptide
GNPEAPGNMGLFDQQLALQWVQKNIAAFGGNPKSVT

SEQ ID NO: 17669 - protein, 36 aa, Artificial sequence
  synthetic peptide
NPEAPGNMGLFDQQLALQWVQKNIAAFGGNPKSVTL

SEQ ID NO: 17670 - protein, 36 aa, Artificial sequence
  synthetic peptide
PEAPGNMGLFDQQLALQWVQKNIAAFGGNPKSVTLF

SEQ ID NO: 17671 - protein, 36 aa, Artificial sequence
  synthetic peptide
EAPGNMGLFDQQLALQWVQKNIAAFGGNPKSVTLFG

SEQ ID NO: 17672 - protein, 36 aa, Artificial sequence
  synthetic peptide
APGNMGLFDQQLALQWVQKNIAAFGGNPKSVTLFGE

SEQ ID NO: 17673 - protein, 36 aa, Artificial sequence
  synthetic peptide
PGNMGLFDQQLALQWVQKNIAAFGGNPKSVTLFGES

SEQ ID NO: 17674 - protein, 36 aa, Artificial sequence
  synthetic peptide
GNMGLFDQQLALQWVQKNIAAFGGNPKSVTLFGESA

SEQ ID NO: 17675 - protein, 36 aa, Artificial sequence
  synthetic peptide
NMGLFDQQLALQWVQKNIAAFGGNPKSVTLFGESAG

SEQ ID NO: 17676 - protein, 36 aa, Artificial sequence
  synthetic peptide
MGLFDQQLALQWVQKNIAAFGGNPKSVTLFGESAGA

SEQ ID NO: 17677 - protein, 36 aa, Artificial sequence
  synthetic peptide
GLFDQQLALQWVQKNIAAFGGNPKSVTLFGESAGAA

SEQ ID NO: 17678 - protein, 36 aa, Artificial sequence
  synthetic peptide
LFDQQLALQWVQKNIAAFGGNPKSVTLFGESAGAAS

SEQ ID NO: 17679 - protein, 36 aa, Artificial sequence
  synthetic peptide
FDQQLALQWVQKNIAAFGGNPKSVTLFGESAGAASV

SEQ ID NO: 17680 - protein, 36 aa, Artificial sequence
  synthetic peptide
DQQLALQWVQKNIAAFGGNPKSVTLFGESAGAASVS

SEQ ID NO: 17681 - protein, 36 aa, Artificial sequence
  synthetic peptide
QQLALQWVQKNIAAFGGNPKSVTLFGESAGAASVSL

SEQ ID NO: 17682 - protein, 36 aa, Artificial sequence
  synthetic peptide
QLALQWVQKNIAAFGGNPKSVTLFGESAGAASVSLH

SEQ ID NO: 17683 - protein, 36 aa, Artificial sequence
  synthetic peptide
LALQWVQKNIAAFGGNPKSVTLFGESAGAASVSLHL

SEQ ID NO: 17684 - protein, 36 aa, Artificial sequence
  synthetic peptide
ALQWVQKNIAAFGGNPKSVTLFGESAGAASVSLHLL

SEQ ID NO: 17685 - protein, 36 aa, Artificial sequence
  synthetic peptide
LQWVQKNIAAFGGNPKSVTLFGESAGAASVSLHLLS

SEQ ID NO: 17686 - protein, 36 aa, Artificial sequence
  synthetic peptide
QWVQKNIAAFGGNPKSVTLFGESAGAASVSLHLLSP

SEQ ID NO: 17687 - protein, 36 aa, Artificial sequence
  synthetic peptide
WVQKNIAAFGGNPKSVTLFGESAGAASVSLHLLSPG

SEQ ID NO: 17688 - protein, 36 aa, Artificial sequence
  synthetic peptide
VQKNIAAFGGNPKSVTLFGESAGAASVSLHLLSPGS

SEQ ID NO: 17689 - protein, 36 aa, Artificial sequence
  synthetic peptide
QKNIAAFGGNPKSVTLFGESAGAASVSLHLLSPGSH

SEQ ID NO: 17690 - protein, 36 aa, Artificial sequence
  synthetic peptide
KNIAAFGGNPKSVTLFGESAGAASVSLHLLSPGSHS

SEQ ID NO: 17691 - protein, 36 aa, Artificial sequence
  synthetic peptide
NIAAFGGNPKSVTLFGESAGAASVSLHLLSPGSHSL

SEQ ID NO: 17692 - protein, 36 aa, Artificial sequence
  synthetic peptide
IAAFGGNPKSVTLFGESAGAASVSLHLLSPGSHSLF

SEQ ID NO: 17693 - protein, 36 aa, Artificial sequence
  synthetic peptide
AAFGGNPKSVTLFGESAGAASVSLHLLSPGSHSLFT

SEQ ID NO: 17694 - protein, 36 aa, Artificial sequence
  synthetic peptide
AFGGNPKSVTLFGESAGAASVSLHLLSPGSHSLFTR

SEQ ID NO: 17695 - protein, 36 aa, Artificial sequence
  synthetic peptide
FGGNPKSVTLFGESAGAASVSLHLLSPGSHSLFTRA

SEQ ID NO: 17696 - protein, 36 aa, Artificial sequence
  synthetic peptide
GGNPKSVTLFGESAGAASVSLHLLSPGSHSLFTRAI

SEQ ID NO: 17697 - protein, 36 aa, Artificial sequence
  synthetic peptide
GNPKSVTLFGESAGAASVSLHLLSPGSHSLFTRAIL

SEQ ID NO: 17698 - protein, 36 aa, Artificial sequence
  synthetic peptide
NPKSVTLFGESAGAASVSLHLLSPGSHSLFTRAILQ

SEQ ID NO: 17699 - protein, 36 aa, Artificial sequence
  synthetic peptide
PKSVTLFGESAGAASVSLHLLSPGSHSLFTRAILQS

SEQ ID NO: 17700 - protein, 36 aa, Artificial sequence
  synthetic peptide
KSVTLFGESAGAASVSLHLLSPGSHSLFTRAILQSG

SEQ ID NO: 17701 - protein, 36 aa, Artificial sequence
  synthetic peptide
SVTLFGESAGAASVSLHLLSPGSHSLFTRAILQSGS

SEQ ID NO: 17702 - protein, 36 aa, Artificial sequence
  synthetic peptide
VTLFGESAGAASVSLHLLSPGSHSLFTRAILQSGSF

SEQ ID NO: 17703 - protein, 36 aa, Artificial sequence
  synthetic peptide
TLFGESAGAASVSLHLLSPGSHSLFTRAILQSGSFN

SEQ ID NO: 17704 - protein, 36 aa, Artificial sequence
  synthetic peptide
LFGESAGAASVSLHLLSPGSHSLFTRAILQSGSFNA

SEQ ID NO: 17705 - protein, 36 aa, Artificial sequence
  synthetic peptide
FGESAGAASVSLHLLSPGSHSLFTRAILQSGSFNAP

SEQ ID NO: 17706 - protein, 36 aa, Artificial sequence
  synthetic peptide
GESAGAASVSLHLLSPGSHSLFTRAILQSGSFNAPW

SEQ ID NO: 17707 - protein, 36 aa, Artificial sequence
  synthetic peptide
ESAGAASVSLHLLSPGSHSLFTRAILQSGSFNAPWA

SEQ ID NO: 17708 - protein, 36 aa, Artificial sequence
  synthetic peptide
SAGAASVSLHLLSPGSHSLFTRAILQSGSFNAPWAV

SEQ ID NO: 17709 - protein, 36 aa, Artificial sequence
  synthetic peptide
AGAASVSLHLLSPGSHSLFTRAILQSGSFNAPWAVT

SEQ ID NO: 17710 - protein, 36 aa, Artificial sequence
  synthetic peptide
GAASVSLHLLSPGSHSLFTRAILQSGSFNAPWAVTS

SEQ ID NO: 17711 - protein, 36 aa, Artificial sequence
  synthetic peptide
AASVSLHLLSPGSHSLFTRAILQSGSFNAPWAVTSL

SEQ ID NO: 17712 - protein, 36 aa, Artificial sequence
  synthetic peptide
ASVSLHLLSPGSHSLFTRAILQSGSFNAPWAVTSLY

SEQ ID NO: 17713 - protein, 36 aa, Artificial sequence
  synthetic peptide
SVSLHLLSPGSHSLFTRAILQSGSFNAPWAVTSLYE

SEQ ID NO: 17714 - protein, 36 aa, Artificial sequence
  synthetic peptide
VSLHLLSPGSHSLFTRAILQSGSFNAPWAVTSLYEA

SEQ ID NO: 17715 - protein, 36 aa, Artificial sequence
  synthetic peptide
SLHLLSPGSHSLFTRAILQSGSFNAPWAVTSLYEAR

SEQ ID NO: 17716 - protein, 36 aa, Artificial sequence
  synthetic peptide
LHLLSPGSHSLFTRAILQSGSFNAPWAVTSLYEARN

SEQ ID NO: 17717 - protein, 36 aa, Artificial sequence
  synthetic peptide
HLLSPGSHSLFTRAILQSGSFNAPWAVTSLYEARNR

SEQ ID NO: 17718 - protein, 36 aa, Artificial sequence
  synthetic peptide
LLSPGSHSLFTRAILQSGSFNAPWAVTSLYEARNRT

SEQ ID NO: 17719 - protein, 36 aa, Artificial sequence
  synthetic peptide
LSPGSHSLFTRAILQSGSFNAPWAVTSLYEARNRTL

SEQ ID NO: 17720 - protein, 36 aa, Artificial sequence
  synthetic peptide
SPGSHSLFTRAILQSGSFNAPWAVTSLYEARNRTLN

SEQ ID NO: 17721 - protein, 36 aa, Artificial sequence
  synthetic peptide
PGSHSLFTRAILQSGSFNAPWAVTSLYEARNRTLNL

SEQ ID NO: 17722 - protein, 36 aa, Artificial sequence
  synthetic peptide
GSHSLFTRAILQSGSFNAPWAVTSLYEARNRTLNLA

SEQ ID NO: 17723 - protein, 36 aa, Artificial sequence
  synthetic peptide
SHSLFTRAILQSGSFNAPWAVTSLYEARNRTLNLAK

SEQ ID NO: 17724 - protein, 36 aa, Artificial sequence
  synthetic peptide
HSLFTRAILQSGSFNAPWAVTSLYEARNRTLNLAKL

SEQ ID NO: 17725 - protein, 36 aa, Artificial sequence
  synthetic peptide
SLFTRAILQSGSFNAPWAVTSLYEARNRTLNLAKLT

SEQ ID NO: 17726 - protein, 36 aa, Artificial sequence
  synthetic peptide
LFTRAILQSGSFNAPWAVTSLYEARNRTLNLAKLTG

SEQ ID NO: 17727 - protein, 36 aa, Artificial sequence
  synthetic peptide
FTRAILQSGSFNAPWAVTSLYEARNRTLNLAKLTGC

SEQ ID NO: 17728 - protein, 36 aa, Artificial sequence
  synthetic peptide
TRAILQSGSFNAPWAVTSLYEARNRTLNLAKLTGCS

SEQ ID NO: 17729 - protein, 36 aa, Artificial sequence
  synthetic peptide
RAILQSGSFNAPWAVTSLYEARNRTLNLAKLTGCSR

SEQ ID NO: 17730 - protein, 36 aa, Artificial sequence
  synthetic peptide
AILQSGSFNAPWAVTSLYEARNRTLNLAKLTGCSRE

SEQ ID NO: 17731 - protein, 36 aa, Artificial sequence
  synthetic peptide
ILQSGSFNAPWAVTSLYEARNRTLNLAKLTGCSREN

SEQ ID NO: 17732 - protein, 36 aa, Artificial sequence
  synthetic peptide
LQSGSFNAPWAVTSLYEARNRTLNLAKLTGCSRENE

SEQ ID NO: 17733 - protein, 36 aa, Artificial sequence
  synthetic peptide
QSGSFNAPWAVTSLYEARNRTLNLAKLTGCSRENET

SEQ ID NO: 17734 - protein, 36 aa, Artificial sequence
  synthetic peptide
SGSFNAPWAVTSLYEARNRTLNLAKLTGCSRENETE

SEQ ID NO: 17735 - protein, 36 aa, Artificial sequence
  synthetic peptide
GSFNAPWAVTSLYEARNRTLNLAKLTGCSRENETEI

SEQ ID NO: 17736 - protein, 36 aa, Artificial sequence
  synthetic peptide
SFNAPWAVTSLYEARNRTLNLAKLTGCSRENETEII

SEQ ID NO: 17737 - protein, 36 aa, Artificial sequence
  synthetic peptide
FNAPWAVTSLYEARNRTLNLAKLTGCSRENETEIIK

SEQ ID NO: 17738 - protein, 36 aa, Artificial sequence
  synthetic peptide
NAPWAVTSLYEARNRTLNLAKLTGCSRENETEIIKC

SEQ ID NO: 17739 - protein, 36 aa, Artificial sequence
  synthetic peptide
APWAVTSLYEARNRTLNLAKLTGCSRENETEIIKCL

SEQ ID NO: 17740 - protein, 36 aa, Artificial sequence
  synthetic peptide
PWAVTSLYEARNRTLNLAKLTGCSRENETEIIKCLR

SEQ ID NO: 17741 - protein, 36 aa, Artificial sequence
  synthetic peptide
WAVTSLYEARNRTLNLAKLTGCSRENETEIIKCLRN

SEQ ID NO: 17742 - protein, 36 aa, Artificial sequence
  synthetic peptide
AVTSLYEARNRTLNLAKLTGCSRENETEIIKCLRNK

SEQ ID NO: 17743 - protein, 36 aa, Artificial sequence
  synthetic peptide
VTSLYEARNRTLNLAKLTGCSRENETEIIKCLRNKD

SEQ ID NO: 17744 - protein, 36 aa, Artificial sequence
  synthetic peptide
TSLYEARNRTLNLAKLTGCSRENETEIIKCLRNKDP

SEQ ID NO: 17745 - protein, 36 aa, Artificial sequence
  synthetic peptide
SLYEARNRTLNLAKLTGCSRENETEIIKCLRNKDPQ

SEQ ID NO: 17746 - protein, 36 aa, Artificial sequence
  synthetic peptide
LYEARNRTLNLAKLTGCSRENETEIIKCLRNKDPQE

SEQ ID NO: 17747 - protein, 36 aa, Artificial sequence
  synthetic peptide
YEARNRTLNLAKLTGCSRENETEIIKCLRNKDPQEI

SEQ ID NO: 17748 - protein, 36 aa, Artificial sequence
  synthetic peptide
EARNRTLNLAKLTGCSRENETEIIKCLRNKDPQEIL

SEQ ID NO: 17749 - protein, 36 aa, Artificial sequence
  synthetic peptide
ARNRTLNLAKLTGCSRENETEIIKCLRNKDPQEILL

SEQ ID NO: 17750 - protein, 36 aa, Artificial sequence
  synthetic peptide
RNRTLNLAKLTGCSRENETEIIKCLRNKDPQEILLN

SEQ ID NO: 17751 - protein, 36 aa, Artificial sequence
  synthetic peptide
NRTLNLAKLTGCSRENETEIIKCLRNKDPQEILLNE

SEQ ID NO: 17752 - protein, 36 aa, Artificial sequence
  synthetic peptide
RTLNLAKLTGCSRENETEIIKCLRNKDPQEILLNEA

SEQ ID NO: 17753 - protein, 36 aa, Artificial sequence
  synthetic peptide
TLNLAKLTGCSRENETEIIKCLRNKDPQEILLNEAF

SEQ ID NO: 17754 - protein, 36 aa, Artificial sequence
  synthetic peptide
LNLAKLTGCSRENETEIIKCLRNKDPQEILLNEAFV

SEQ ID NO: 17755 - protein, 36 aa, Artificial sequence
  synthetic peptide
NLAKLTGCSRENETEIIKCLRNKDPQEILLNEAFVV

SEQ ID NO: 17756 - protein, 36 aa, Artificial sequence
  synthetic peptide
LAKLTGCSRENETEIIKCLRNKDPQEILLNEAFVVP

SEQ ID NO: 17757 - protein, 36 aa, Artificial sequence
  synthetic peptide
AKLTGCSRENETEIIKCLRNKDPQEILLNEAFVVPY

SEQ ID NO: 17758 - protein, 36 aa, Artificial sequence
  synthetic peptide
KLTGCSRENETEIIKCLRNKDPQEILLNEAFVVPYG

SEQ ID NO: 17759 - protein, 36 aa, Artificial sequence
  synthetic peptide
LTGCSRENETEIIKCLRNKDPQEILLNEAFVVPYGT

SEQ ID NO: 17760 - protein, 36 aa, Artificial sequence
  synthetic peptide
TGCSRENETEIIKCLRNKDPQEILLNEAFVVPYGTP

SEQ ID NO: 17761 - protein, 36 aa, Artificial sequence
  synthetic peptide
GCSRENETEIIKCLRNKDPQEILLNEAFVVPYGTPL

SEQ ID NO: 17762 - protein, 36 aa, Artificial sequence
  synthetic peptide
CSRENETEIIKCLRNKDPQEILLNEAFVVPYGTPLS

SEQ ID NO: 17763 - protein, 36 aa, Artificial sequence
  synthetic peptide
SRENETEIIKCLRNKDPQEILLNEAFVVPYGTPLSV

SEQ ID NO: 17764 - protein, 36 aa, Artificial sequence
  synthetic peptide
RENETEIIKCLRNKDPQEILLNEAFVVPYGTPLSVN

SEQ ID NO: 17765 - protein, 36 aa, Artificial sequence
  synthetic peptide
ENETEIIKCLRNKDPQEILLNEAFVVPYGTPLSVNF

SEQ ID NO: 17766 - protein, 36 aa, Artificial sequence
  synthetic peptide
NETEIIKCLRNKDPQEILLNEAFVVPYGTPLSVNFG

SEQ ID NO: 17767 - protein, 36 aa, Artificial sequence
  synthetic peptide
ETEIIKCLRNKDPQEILLNEAFVVPYGTPLSVNFGP

SEQ ID NO: 17768 - protein, 36 aa, Artificial sequence
  synthetic peptide
TEIIKCLRNKDPQEILLNEAFVVPYGTPLSVNFGPT

SEQ ID NO: 17769 - protein, 36 aa, Artificial sequence
  synthetic peptide
EIIKCLRNKDPQEILLNEAFVVPYGTPLSVNFGPTV

SEQ ID NO: 17770 - protein, 36 aa, Artificial sequence
  synthetic peptide
IIKCLRNKDPQEILLNEAFVVPYGTPLSVNFGPTVD

SEQ ID NO: 17771 - protein, 36 aa, Artificial sequence
  synthetic peptide
IKCLRNKDPQEILLNEAFVVPYGTPLSVNFGPTVDG

SEQ ID NO: 17772 - protein, 36 aa, Artificial sequence
  synthetic peptide
KCLRNKDPQEILLNEAFVVPYGTPLSVNFGPTVDGD

SEQ ID NO: 17773 - protein, 36 aa, Artificial sequence
  synthetic peptide
CLRNKDPQEILLNEAFVVPYGTPLSVNFGPTVDGDF

SEQ ID NO: 17774 - protein, 36 aa, Artificial sequence
  synthetic peptide
LRNKDPQEILLNEAFVVPYGTPLSVNFGPTVDGDFL

SEQ ID NO: 17775 - protein, 36 aa, Artificial sequence
  synthetic peptide
RNKDPQEILLNEAFVVPYGTPLSVNFGPTVDGDFLT

SEQ ID NO: 17776 - protein, 36 aa, Artificial sequence
  synthetic peptide
NKDPQEILLNEAFVVPYGTPLSVNFGPTVDGDFLTD

SEQ ID NO: 17777 - protein, 36 aa, Artificial sequence
  synthetic peptide
KDPQEILLNEAFVVPYGTPLSVNFGPTVDGDFLTDM

SEQ ID NO: 17778 - protein, 36 aa, Artificial sequence
  synthetic peptide
DPQEILLNEAFVVPYGTPLSVNFGPTVDGDFLTDMP

SEQ ID NO: 17779 - protein, 36 aa, Artificial sequence
  synthetic peptide
PQEILLNEAFVVPYGTPLSVNFGPTVDGDFLTDMPD

SEQ ID NO: 17780 - protein, 36 aa, Artificial sequence
  synthetic peptide
QEILLNEAFVVPYGTPLSVNFGPTVDGDFLTDMPDI

SEQ ID NO: 17781 - protein, 36 aa, Artificial sequence
  synthetic peptide
EILLNEAFVVPYGTPLSVNFGPTVDGDFLTDMPDIL

SEQ ID NO: 17782 - protein, 36 aa, Artificial sequence
  synthetic peptide
ILLNEAFVVPYGTPLSVNFGPTVDGDFLTDMPDILL

SEQ ID NO: 17783 - protein, 36 aa, Artificial sequence
  synthetic peptide
LLNEAFVVPYGTPLSVNFGPTVDGDFLTDMPDILLE

SEQ ID NO: 17784 - protein, 36 aa, Artificial sequence
  synthetic peptide
LNEAFVVPYGTPLSVNFGPTVDGDFLTDMPDILLEL

SEQ ID NO: 17785 - protein, 36 aa, Artificial sequence
  synthetic peptide
NEAFVVPYGTPLSVNFGPTVDGDFLTDMPDILLELG

SEQ ID NO: 17786 - protein, 36 aa, Artificial sequence
  synthetic peptide
EAFVVPYGTPLSVNFGPTVDGDFLTDMPDILLELGQ

SEQ ID NO: 17787 - protein, 36 aa, Artificial sequence
  synthetic peptide
AFVVPYGTPLSVNFGPTVDGDFLTDMPDILLELGQF

SEQ ID NO: 17788 - protein, 36 aa, Artificial sequence
  synthetic peptide
FVVPYGTPLSVNFGPTVDGDFLTDMPDILLELGQFK

SEQ ID NO: 17789 - protein, 36 aa, Artificial sequence
  synthetic peptide
VVPYGTPLSVNFGPTVDGDFLTDMPDILLELGQFKK

SEQ ID NO: 17790 - protein, 36 aa, Artificial sequence
  synthetic peptide
VPYGTPLSVNFGPTVDGDFLTDMPDILLELGQFKKT

SEQ ID NO: 17791 - protein, 36 aa, Artificial sequence
  synthetic peptide
PYGTPLSVNFGPTVDGDFLTDMPDILLELGQFKKTQ

SEQ ID NO: 17792 - protein, 36 aa, Artificial sequence
  synthetic peptide
YGTPLSVNFGPTVDGDFLTDMPDILLELGQFKKTQI

SEQ ID NO: 17793 - protein, 36 aa, Artificial sequence
  synthetic peptide
GTPLSVNFGPTVDGDFLTDMPDILLELGQFKKTQIL

SEQ ID NO: 17794 - protein, 36 aa, Artificial sequence
  synthetic peptide
TPLSVNFGPTVDGDFLTDMPDILLELGQFKKTQILV

SEQ ID NO: 17795 - protein, 36 aa, Artificial sequence
  synthetic peptide
PLSVNFGPTVDGDFLTDMPDILLELGQFKKTQILVG

SEQ ID NO: 17796 - protein, 36 aa, Artificial sequence
  synthetic peptide
LSVNFGPTVDGDFLTDMPDILLELGQFKKTQILVGV

SEQ ID NO: 17797 - protein, 36 aa, Artificial sequence
  synthetic peptide
SVNFGPTVDGDFLTDMPDILLELGQFKKTQILVGVN

SEQ ID NO: 17798 - protein, 36 aa, Artificial sequence
  synthetic peptide
VNFGPTVDGDFLTDMPDILLELGQFKKTQILVGVNK

SEQ ID NO: 17799 - protein, 36 aa, Artificial sequence
  synthetic peptide
NFGPTVDGDFLTDMPDILLELGQFKKTQILVGVNKD

SEQ ID NO: 17800 - protein, 36 aa, Artificial sequence
  synthetic peptide
FGPTVDGDFLTDMPDILLELGQFKKTQILVGVNKDE

SEQ ID NO: 17801 - protein, 36 aa, Artificial sequence
  synthetic peptide
GPTVDGDFLTDMPDILLELGQFKKTQILVGVNKDEG

SEQ ID NO: 17802 - protein, 36 aa, Artificial sequence
  synthetic peptide
PTVDGDFLTDMPDILLELGQFKKTQILVGVNKDEGT

SEQ ID NO: 17803 - protein, 36 aa, Artificial sequence
  synthetic peptide
TVDGDFLTDMPDILLELGQFKKTQILVGVNKDEGTA

SEQ ID NO: 17804 - protein, 36 aa, Artificial sequence
  synthetic peptide
VDGDFLTDMPDILLELGQFKKTQILVGVNKDEGTAF

SEQ ID NO: 17805 - protein, 36 aa, Artificial sequence
  synthetic peptide
DGDFLTDMPDILLELGQFKKTQILVGVNKDEGTAFL

SEQ ID NO: 17806 - protein, 36 aa, Artificial sequence
  synthetic peptide
GDFLTDMPDILLELGQFKKTQILVGVNKDEGTAFLV

SEQ ID NO: 17807 - protein, 36 aa, Artificial sequence
  synthetic peptide
DFLTDMPDILLELGQFKKTQILVGVNKDEGTAFLVY

SEQ ID NO: 17808 - protein, 36 aa, Artificial sequence
  synthetic peptide
FLTDMPDILLELGQFKKTQILVGVNKDEGTAFLVYG

SEQ ID NO: 17809 - protein, 36 aa, Artificial sequence
  synthetic peptide
LTDMPDILLELGQFKKTQILVGVNKDEGTAFLVYGA

SEQ ID NO: 17810 - protein, 36 aa, Artificial sequence
  synthetic peptide
TDMPDILLELGQFKKTQILVGVNKDEGTAFLVYGAP

SEQ ID NO: 17811 - protein, 36 aa, Artificial sequence
  synthetic peptide
DMPDILLELGQFKKTQILVGVNKDEGTAFLVYGAPG

SEQ ID NO: 17812 - protein, 36 aa, Artificial sequence
  synthetic peptide
MPDILLELGQFKKTQILVGVNKDEGTAFLVYGAPGF

SEQ ID NO: 17813 - protein, 36 aa, Artificial sequence
  synthetic peptide
PDILLELGQFKKTQILVGVNKDEGTAFLVYGAPGFS

SEQ ID NO: 17814 - protein, 36 aa, Artificial sequence
  synthetic peptide
DILLELGQFKKTQILVGVNKDEGTAFLVYGAPGFSK

SEQ ID NO: 17815 - protein, 36 aa, Artificial sequence
  synthetic peptide
ILLELGQFKKTQILVGVNKDEGTAFLVYGAPGFSKD

SEQ ID NO: 17816 - protein, 36 aa, Artificial sequence
  synthetic peptide
LLELGQFKKTQILVGVNKDEGTAFLVYGAPGFSKDN

SEQ ID NO: 17817 - protein, 36 aa, Artificial sequence
  synthetic peptide
LELGQFKKTQILVGVNKDEGTAFLVYGAPGFSKDNN

SEQ ID NO: 17818 - protein, 36 aa, Artificial sequence
  synthetic peptide
ELGQFKKTQILVGVNKDEGTAFLVYGAPGFSKDNNS

SEQ ID NO: 17819 - protein, 36 aa, Artificial sequence
  synthetic peptide
LGQFKKTQILVGVNKDEGTAFLVYGAPGFSKDNNSI

SEQ ID NO: 17820 - protein, 36 aa, Artificial sequence
  synthetic peptide
GQFKKTQILVGVNKDEGTAFLVYGAPGFSKDNNSII

SEQ ID NO: 17821 - protein, 36 aa, Artificial sequence
  synthetic peptide
QFKKTQILVGVNKDEGTAFLVYGAPGFSKDNNSIIT

SEQ ID NO: 17822 - protein, 36 aa, Artificial sequence
  synthetic peptide
FKKTQILVGVNKDEGTAFLVYGAPGFSKDNNSIITR

SEQ ID NO: 17823 - protein, 36 aa, Artificial sequence
  synthetic peptide
KKTQILVGVNKDEGTAFLVYGAPGFSKDNNSIITRK

SEQ ID NO: 17824 - protein, 36 aa, Artificial sequence
  synthetic peptide
KTQILVGVNKDEGTAFLVYGAPGFSKDNNSIITRKE

SEQ ID NO: 17825 - protein, 36 aa, Artificial sequence
  synthetic peptide
TQILVGVNKDEGTAFLVYGAPGFSKDNNSIITRKEF

SEQ ID NO: 17826 - protein, 36 aa, Artificial sequence
  synthetic peptide
QILVGVNKDEGTAFLVYGAPGFSKDNNSIITRKEFQ

SEQ ID NO: 17827 - protein, 36 aa, Artificial sequence
  synthetic peptide
ILVGVNKDEGTAFLVYGAPGFSKDNNSIITRKEFQE

SEQ ID NO: 17828 - protein, 36 aa, Artificial sequence
  synthetic peptide
LVGVNKDEGTAFLVYGAPGFSKDNNSIITRKEFQEG

SEQ ID NO: 17829 - protein, 36 aa, Artificial sequence
  synthetic peptide
VGVNKDEGTAFLVYGAPGFSKDNNSIITRKEFQEGL

SEQ ID NO: 17830 - protein, 36 aa, Artificial sequence
  synthetic peptide
GVNKDEGTAFLVYGAPGFSKDNNSIITRKEFQEGLK

SEQ ID NO: 17831 - protein, 36 aa, Artificial sequence
  synthetic peptide
VNKDEGTAFLVYGAPGFSKDNNSIITRKEFQEGLKI

SEQ ID NO: 17832 - protein, 36 aa, Artificial sequence
  synthetic peptide
NKDEGTAFLVYGAPGFSKDNNSIITRKEFQEGLKIF

SEQ ID NO: 17833 - protein, 36 aa, Artificial sequence
  synthetic peptide
KDEGTAFLVYGAPGFSKDNNSIITRKEFQEGLKIFF

SEQ ID NO: 17834 - protein, 36 aa, Artificial sequence
  synthetic peptide
DEGTAFLVYGAPGFSKDNNSIITRKEFQEGLKIFFP

SEQ ID NO: 17835 - protein, 36 aa, Artificial sequence
  synthetic peptide
EGTAFLVYGAPGFSKDNNSIITRKEFQEGLKIFFPG

SEQ ID NO: 17836 - protein, 36 aa, Artificial sequence
  synthetic peptide
GTAFLVYGAPGFSKDNNSIITRKEFQEGLKIFFPGV

SEQ ID NO: 17837 - protein, 36 aa, Artificial sequence
  synthetic peptide
TAFLVYGAPGFSKDNNSIITRKEFQEGLKIFFPGVS

SEQ ID NO: 17838 - protein, 36 aa, Artificial sequence
  synthetic peptide
AFLVYGAPGFSKDNNSIITRKEFQEGLKIFFPGVSE

SEQ ID NO: 17839 - protein, 36 aa, Artificial sequence
  synthetic peptide
FLVYGAPGFSKDNNSIITRKEFQEGLKIFFPGVSEF

SEQ ID NO: 17840 - protein, 36 aa, Artificial sequence
  synthetic peptide
LVYGAPGFSKDNNSIITRKEFQEGLKIFFPGVSEFG

SEQ ID NO: 17841 - protein, 36 aa, Artificial sequence
  synthetic peptide
VYGAPGFSKDNNSIITRKEFQEGLKIFFPGVSEFGK

SEQ ID NO: 17842 - protein, 36 aa, Artificial sequence
  synthetic peptide
YGAPGFSKDNNSIITRKEFQEGLKIFFPGVSEFGKE

SEQ ID NO: 17843 - protein, 36 aa, Artificial sequence
  synthetic peptide
GAPGFSKDNNSIITRKEFQEGLKIFFPGVSEFGKES

SEQ ID NO: 17844 - protein, 36 aa, Artificial sequence
  synthetic peptide
APGFSKDNNSIITRKEFQEGLKIFFPGVSEFGKESI

SEQ ID NO: 17845 - protein, 36 aa, Artificial sequence
  synthetic peptide
PGFSKDNNSIITRKEFQEGLKIFFPGVSEFGKESIL

SEQ ID NO: 17846 - protein, 36 aa, Artificial sequence
  synthetic peptide
GFSKDNNSIITRKEFQEGLKIFFPGVSEFGKESILF

SEQ ID NO: 17847 - protein, 36 aa, Artificial sequence
  synthetic peptide
FSKDNNSIITRKEFQEGLKIFFPGVSEFGKESILFH

SEQ ID NO: 17848 - protein, 36 aa, Artificial sequence
  synthetic peptide
SKDNNSIITRKEFQEGLKIFFPGVSEFGKESILFHY

SEQ ID NO: 17849 - protein, 36 aa, Artificial sequence
  synthetic peptide
KDNNSIITRKEFQEGLKIFFPGVSEFGKESILFHYT

SEQ ID NO: 17850 - protein, 36 aa, Artificial sequence
  synthetic peptide
DNNSIITRKEFQEGLKIFFPGVSEFGKESILFHYTD

SEQ ID NO: 17851 - protein, 36 aa, Artificial sequence
  synthetic peptide
NNSIITRKEFQEGLKIFFPGVSEFGKESILFHYTDW

SEQ ID NO: 17852 - protein, 36 aa, Artificial sequence
  synthetic peptide
NSIITRKEFQEGLKIFFPGVSEFGKESILFHYTDWV

SEQ ID NO: 17853 - protein, 36 aa, Artificial sequence
  synthetic peptide
SIITRKEFQEGLKIFFPGVSEFGKESILFHYTDWVD

SEQ ID NO: 17854 - protein, 36 aa, Artificial sequence
  synthetic peptide
IITRKEFQEGLKIFFPGVSEFGKESILFHYTDWVDD

SEQ ID NO: 17855 - protein, 36 aa, Artificial sequence
  synthetic peptide
ITRKEFQEGLKIFFPGVSEFGKESILFHYTDWVDDQ

SEQ ID NO: 17856 - protein, 36 aa, Artificial sequence
  synthetic peptide
TRKEFQEGLKIFFPGVSEFGKESILFHYTDWVDDQR

SEQ ID NO: 17857 - protein, 36 aa, Artificial sequence
  synthetic peptide
RKEFQEGLKIFFPGVSEFGKESILFHYTDWVDDQRP

SEQ ID NO: 17858 - protein, 36 aa, Artificial sequence
  synthetic peptide
KEFQEGLKIFFPGVSEFGKESILFHYTDWVDDQRPE

SEQ ID NO: 17859 - protein, 36 aa, Artificial sequence
  synthetic peptide
EFQEGLKIFFPGVSEFGKESILFHYTDWVDDQRPEN

SEQ ID NO: 17860 - protein, 36 aa, Artificial sequence
  synthetic peptide
FQEGLKIFFPGVSEFGKESILFHYTDWVDDQRPENY

SEQ ID NO: 17861 - protein, 36 aa, Artificial sequence
  synthetic peptide
QEGLKIFFPGVSEFGKESILFHYTDWVDDQRPENYR

SEQ ID NO: 17862 - protein, 36 aa, Artificial sequence
  synthetic peptide
EGLKIFFPGVSEFGKESILFHYTDWVDDQRPENYRE

SEQ ID NO: 17863 - protein, 36 aa, Artificial sequence
  synthetic peptide
GLKIFFPGVSEFGKESILFHYTDWVDDQRPENYREA

SEQ ID NO: 17864 - protein, 36 aa, Artificial sequence
  synthetic peptide
LKIFFPGVSEFGKESILFHYTDWVDDQRPENYREAL

SEQ ID NO: 17865 - protein, 36 aa, Artificial sequence
  synthetic peptide
KIFFPGVSEFGKESILFHYTDWVDDQRPENYREALG

SEQ ID NO: 17866 - protein, 36 aa, Artificial sequence
  synthetic peptide
IFFPGVSEFGKESILFHYTDWVDDQRPENYREALGD

SEQ ID NO: 17867 - protein, 36 aa, Artificial sequence
  synthetic peptide
FFPGVSEFGKESILFHYTDWVDDQRPENYREALGDV

SEQ ID NO: 17868 - protein, 36 aa, Artificial sequence
  synthetic peptide
FPGVSEFGKESILFHYTDWVDDQRPENYREALGDVV

SEQ ID NO: 17869 - protein, 36 aa, Artificial sequence
  synthetic peptide
PGVSEFGKESILFHYTDWVDDQRPENYREALGDVVG

SEQ ID NO: 17870 - protein, 36 aa, Artificial sequence
  synthetic peptide
GVSEFGKESILFHYTDWVDDQRPENYREALGDVVGD

SEQ ID NO: 17871 - protein, 36 aa, Artificial sequence
  synthetic peptide
VSEFGKESILFHYTDWVDDQRPENYREALGDVVGDY

SEQ ID NO: 17872 - protein, 36 aa, Artificial sequence
  synthetic peptide
SEFGKESILFHYTDWVDDQRPENYREALGDVVGDYN

SEQ ID NO: 17873 - protein, 36 aa, Artificial sequence
  synthetic peptide
EFGKESILFHYTDWVDDQRPENYREALGDVVGDYNF

SEQ ID NO: 17874 - protein, 36 aa, Artificial sequence
  synthetic peptide
FGKESILFHYTDWVDDQRPENYREALGDVVGDYNFI

SEQ ID NO: 17875 - protein, 36 aa, Artificial sequence
  synthetic peptide
GKESILFHYTDWVDDQRPENYREALGDVVGDYNFIC

SEQ ID NO: 17876 - protein, 36 aa, Artificial sequence
  synthetic peptide
KESILFHYTDWVDDQRPENYREALGDVVGDYNFICP

SEQ ID NO: 17877 - protein, 36 aa, Artificial sequence
  synthetic peptide
ESILFHYTDWVDDQRPENYREALGDVVGDYNFICPA

SEQ ID NO: 17878 - protein, 36 aa, Artificial sequence
  synthetic peptide
SILFHYTDWVDDQRPENYREALGDVVGDYNFICPAL

SEQ ID NO: 17879 - protein, 36 aa, Artificial sequence
  synthetic peptide
ILFHYTDWVDDQRPENYREALGDVVGDYNFICPALE

SEQ ID NO: 17880 - protein, 36 aa, Artificial sequence
  synthetic peptide
LFHYTDWVDDQRPENYREALGDVVGDYNFICPALEF

SEQ ID NO: 17881 - protein, 36 aa, Artificial sequence
  synthetic peptide
FHYTDWVDDQRPENYREALGDVVGDYNFICPALEFT

SEQ ID NO: 17882 - protein, 36 aa, Artificial sequence
  synthetic peptide
HYTDWVDDQRPENYREALGDVVGDYNFICPALEFTK

SEQ ID NO: 17883 - protein, 36 aa, Artificial sequence
  synthetic peptide
YTDWVDDQRPENYREALGDVVGDYNFICPALEFTKK

SEQ ID NO: 17884 - protein, 36 aa, Artificial sequence
  synthetic peptide
TDWVDDQRPENYREALGDVVGDYNFICPALEFTKKF

SEQ ID NO: 17885 - protein, 36 aa, Artificial sequence
  synthetic peptide
DWVDDQRPENYREALGDVVGDYNFICPALEFTKKFS

SEQ ID NO: 17886 - protein, 36 aa, Artificial sequence
  synthetic peptide
WVDDQRPENYREALGDVVGDYNFICPALEFTKKFSE

SEQ ID NO: 17887 - protein, 36 aa, Artificial sequence
  synthetic peptide
VDDQRPENYREALGDVVGDYNFICPALEFTKKFSEW

SEQ ID NO: 17888 - protein, 36 aa, Artificial sequence
  synthetic peptide
DDQRPENYREALGDVVGDYNFICPALEFTKKFSEWG

SEQ ID NO: 17889 - protein, 36 aa, Artificial sequence
  synthetic peptide
DQRPENYREALGDVVGDYNFICPALEFTKKFSEWGN

SEQ ID NO: 17890 - protein, 36 aa, Artificial sequence
  synthetic peptide
QRPENYREALGDVVGDYNFICPALEFTKKFSEWGNN

SEQ ID NO: 17891 - protein, 36 aa, Artificial sequence
  synthetic peptide
RPENYREALGDVVGDYNFICPALEFTKKFSEWGNNA

SEQ ID NO: 17892 - protein, 36 aa, Artificial sequence
  synthetic peptide
PENYREALGDVVGDYNFICPALEFTKKFSEWGNNAF

SEQ ID NO: 17893 - protein, 36 aa, Artificial sequence
  synthetic peptide
ENYREALGDVVGDYNFICPALEFTKKFSEWGNNAFF

SEQ ID NO: 17894 - protein, 36 aa, Artificial sequence
  synthetic peptide
NYREALGDVVGDYNFICPALEFTKKFSEWGNNAFFY

SEQ ID NO: 17895 - protein, 36 aa, Artificial sequence
  synthetic peptide
YREALGDVVGDYNFICPALEFTKKFSEWGNNAFFYY

SEQ ID NO: 17896 - protein, 36 aa, Artificial sequence
  synthetic peptide
REALGDVVGDYNFICPALEFTKKFSEWGNNAFFYYF

SEQ ID NO: 17897 - protein, 36 aa, Artificial sequence
  synthetic peptide
EALGDVVGDYNFICPALEFTKKFSEWGNNAFFYYFE

SEQ ID NO: 17898 - protein, 36 aa, Artificial sequence
  synthetic peptide
ALGDVVGDYNFICPALEFTKKFSEWGNNAFFYYFEH

SEQ ID NO: 17899 - protein, 36 aa, Artificial sequence
  synthetic peptide
LGDVVGDYNFICPALEFTKKFSEWGNNAFFYYFEHR

SEQ ID NO: 17900 - protein, 36 aa, Artificial sequence
  synthetic peptide
GDVVGDYNFICPALEFTKKFSEWGNNAFFYYFEHRS

SEQ ID NO: 17901 - protein, 36 aa, Artificial sequence
  synthetic peptide
DVVGDYNFICPALEFTKKFSEWGNNAFFYYFEHRSS

SEQ ID NO: 17902 - protein, 36 aa, Artificial sequence
  synthetic peptide
VVGDYNFICPALEFTKKFSEWGNNAFFYYFEHRSSK

SEQ ID NO: 17903 - protein, 36 aa, Artificial sequence
  synthetic peptide
VGDYNFICPALEFTKKFSEWGNNAFFYYFEHRSSKL

SEQ ID NO: 17904 - protein, 36 aa, Artificial sequence
  synthetic peptide
GDYNFICPALEFTKKFSEWGNNAFFYYFEHRSSKLP

SEQ ID NO: 17905 - protein, 36 aa, Artificial sequence
  synthetic peptide
DYNFICPALEFTKKFSEWGNNAFFYYFEHRSSKLPW

SEQ ID NO: 17906 - protein, 36 aa, Artificial sequence
  synthetic peptide
YNFICPALEFTKKFSEWGNNAFFYYFEHRSSKLPWP

SEQ ID NO: 17907 - protein, 36 aa, Artificial sequence
  synthetic peptide
NFICPALEFTKKFSEWGNNAFFYYFEHRSSKLPWPE

SEQ ID NO: 17908 - protein, 36 aa, Artificial sequence
  synthetic peptide
FICPALEFTKKFSEWGNNAFFYYFEHRSSKLPWPEW

SEQ ID NO: 17909 - protein, 36 aa, Artificial sequence
  synthetic peptide
ICPALEFTKKFSEWGNNAFFYYFEHRSSKLPWPEWM

SEQ ID NO: 17910 - protein, 36 aa, Artificial sequence
  synthetic peptide
CPALEFTKKFSEWGNNAFFYYFEHRSSKLPWPEWMG

SEQ ID NO: 17911 - protein, 36 aa, Artificial sequence
  synthetic peptide
PALEFTKKFSEWGNNAFFYYFEHRSSKLPWPEWMGV

SEQ ID NO: 17912 - protein, 36 aa, Artificial sequence
  synthetic peptide
ALEFTKKFSEWGNNAFFYYFEHRSSKLPWPEWMGVM

SEQ ID NO: 17913 - protein, 36 aa, Artificial sequence
  synthetic peptide
LEFTKKFSEWGNNAFFYYFEHRSSKLPWPEWMGVMH

SEQ ID NO: 17914 - protein, 36 aa, Artificial sequence
  synthetic peptide
EFTKKFSEWGNNAFFYYFEHRSSKLPWPEWMGVMHG

SEQ ID NO: 17915 - protein, 36 aa, Artificial sequence
  synthetic peptide
FTKKFSEWGNNAFFYYFEHRSSKLPWPEWMGVMHGY

SEQ ID NO: 17916 - protein, 36 aa, Artificial sequence
  synthetic peptide
TKKFSEWGNNAFFYYFEHRSSKLPWPEWMGVMHGYE

SEQ ID NO: 17917 - protein, 36 aa, Artificial sequence
  synthetic peptide
KKFSEWGNNAFFYYFEHRSSKLPWPEWMGVMHGYEI

SEQ ID NO: 17918 - protein, 36 aa, Artificial sequence
  synthetic peptide
KFSEWGNNAFFYYFEHRSSKLPWPEWMGVMHGYEIE

SEQ ID NO: 17919 - protein, 36 aa, Artificial sequence
  synthetic peptide
FSEWGNNAFFYYFEHRSSKLPWPEWMGVMHGYEIEF

SEQ ID NO: 17920 - protein, 36 aa, Artificial sequence
  synthetic peptide
SEWGNNAFFYYFEHRSSKLPWPEWMGVMHGYEIEFV

SEQ ID NO: 17921 - protein, 36 aa, Artificial sequence
  synthetic peptide
EWGNNAFFYYFEHRSSKLPWPEWMGVMHGYEIEFVF

SEQ ID NO: 17922 - protein, 36 aa, Artificial sequence
  synthetic peptide
WGNNAFFYYFEHRSSKLPWPEWMGVMHGYEIEFVFG

SEQ ID NO: 17923 - protein, 36 aa, Artificial sequence
  synthetic peptide
GNNAFFYYFEHRSSKLPWPEWMGVMHGYEIEFVFGL

SEQ ID NO: 17924 - protein, 36 aa, Artificial sequence
  synthetic peptide
NNAFFYYFEHRSSKLPWPEWMGVMHGYEIEFVFGLP

SEQ ID NO: 17925 - protein, 36 aa, Artificial sequence
  synthetic peptide
NAFFYYFEHRSSKLPWPEWMGVMHGYEIEFVFGLPL

SEQ ID NO: 17926 - protein, 36 aa, Artificial sequence
  synthetic peptide
AFFYYFEHRSSKLPWPEWMGVMHGYEIEFVFGLPLE

SEQ ID NO: 17927 - protein, 36 aa, Artificial sequence
  synthetic peptide
FFYYFEHRSSKLPWPEWMGVMHGYEIEFVFGLPLER

SEQ ID NO: 17928 - protein, 36 aa, Artificial sequence
  synthetic peptide
FYYFEHRSSKLPWPEWMGVMHGYEIEFVFGLPLERR

SEQ ID NO: 17929 - protein, 36 aa, Artificial sequence
  synthetic peptide
YYFEHRSSKLPWPEWMGVMHGYEIEFVFGLPLERRD

SEQ ID NO: 17930 - protein, 36 aa, Artificial sequence
  synthetic peptide
YFEHRSSKLPWPEWMGVMHGYEIEFVFGLPLERRDN

SEQ ID NO: 17931 - protein, 36 aa, Artificial sequence
  synthetic peptide
FEHRSSKLPWPEWMGVMHGYEIEFVFGLPLERRDNY

SEQ ID NO: 17932 - protein, 36 aa, Artificial sequence
  synthetic peptide
EHRSSKLPWPEWMGVMHGYEIEFVFGLPLERRDNYT

SEQ ID NO: 17933 - protein, 36 aa, Artificial sequence
  synthetic peptide
HRSSKLPWPEWMGVMHGYEIEFVFGLPLERRDNYTK

SEQ ID NO: 17934 - protein, 36 aa, Artificial sequence
  synthetic peptide
RSSKLPWPEWMGVMHGYEIEFVFGLPLERRDNYTKA

SEQ ID NO: 17935 - protein, 36 aa, Artificial sequence
  synthetic peptide
SSKLPWPEWMGVMHGYEIEFVFGLPLERRDNYTKAE

SEQ ID NO: 17936 - protein, 36 aa, Artificial sequence
  synthetic peptide
SKLPWPEWMGVMHGYEIEFVFGLPLERRDNYTKAEE

SEQ ID NO: 17937 - protein, 36 aa, Artificial sequence
  synthetic peptide
KLPWPEWMGVMHGYEIEFVFGLPLERRDNYTKAEEI

SEQ ID NO: 17938 - protein, 36 aa, Artificial sequence
  synthetic peptide
LPWPEWMGVMHGYEIEFVFGLPLERRDNYTKAEEIL

SEQ ID NO: 17939 - protein, 36 aa, Artificial sequence
  synthetic peptide
PWPEWMGVMHGYEIEFVFGLPLERRDNYTKAEEILS

SEQ ID NO: 17940 - protein, 36 aa, Artificial sequence
  synthetic peptide
WPEWMGVMHGYEIEFVFGLPLERRDNYTKAEEILSR

SEQ ID NO: 17941 - protein, 36 aa, Artificial sequence
  synthetic peptide
PEWMGVMHGYEIEFVFGLPLERRDNYTKAEEILSRS

SEQ ID NO: 17942 - protein, 36 aa, Artificial sequence
  synthetic peptide
EWMGVMHGYEIEFVFGLPLERRDNYTKAEEILSRSI

SEQ ID NO: 17943 - protein, 36 aa, Artificial sequence
  synthetic peptide
WMGVMHGYEIEFVFGLPLERRDNYTKAEEILSRSIV

SEQ ID NO: 17944 - protein, 36 aa, Artificial sequence
  synthetic peptide
MGVMHGYEIEFVFGLPLERRDNYTKAEEILSRSIVK

SEQ ID NO: 17945 - protein, 36 aa, Artificial sequence
  synthetic peptide
GVMHGYEIEFVFGLPLERRDNYTKAEEILSRSIVKR

SEQ ID NO: 17946 - protein, 36 aa, Artificial sequence
  synthetic peptide
VMHGYEIEFVFGLPLERRDNYTKAEEILSRSIVKRW

SEQ ID NO: 17947 - protein, 36 aa, Artificial sequence
  synthetic peptide
MHGYEIEFVFGLPLERRDNYTKAEEILSRSIVKRWA

SEQ ID NO: 17948 - protein, 36 aa, Artificial sequence
  synthetic peptide
HGYEIEFVFGLPLERRDNYTKAEEILSRSIVKRWAN

SEQ ID NO: 17949 - protein, 36 aa, Artificial sequence
  synthetic peptide
GYEIEFVFGLPLERRDNYTKAEEILSRSIVKRWANF

SEQ ID NO: 17950 - protein, 36 aa, Artificial sequence
  synthetic peptide
YEIEFVFGLPLERRDNYTKAEEILSRSIVKRWANFA

SEQ ID NO: 17951 - protein, 36 aa, Artificial sequence
  synthetic peptide
EIEFVFGLPLERRDNYTKAEEILSRSIVKRWANFAK

SEQ ID NO: 17952 - protein, 36 aa, Artificial sequence
  synthetic peptide
IEFVFGLPLERRDNYTKAEEILSRSIVKRWANFAKY

SEQ ID NO: 17953 - protein, 36 aa, Artificial sequence
  synthetic peptide
EFVFGLPLERRDNYTKAEEILSRSIVKRWANFAKYG

SEQ ID NO: 17954 - protein, 36 aa, Artificial sequence
  synthetic peptide
FVFGLPLERRDNYTKAEEILSRSIVKRWANFAKYGN

SEQ ID NO: 17955 - protein, 36 aa, Artificial sequence
  synthetic peptide
VFGLPLERRDNYTKAEEILSRSIVKRWANFAKYGNP

SEQ ID NO: 17956 - protein, 36 aa, Artificial sequence
  synthetic peptide
FGLPLERRDNYTKAEEILSRSIVKRWANFAKYGNPN

SEQ ID NO: 17957 - protein, 36 aa, Artificial sequence
  synthetic peptide
GLPLERRDNYTKAEEILSRSIVKRWANFAKYGNPNE

SEQ ID NO: 17958 - protein, 36 aa, Artificial sequence
  synthetic peptide
LPLERRDNYTKAEEILSRSIVKRWANFAKYGNPNET

SEQ ID NO: 17959 - protein, 36 aa, Artificial sequence
  synthetic peptide
PLERRDNYTKAEEILSRSIVKRWANFAKYGNPNETQ

SEQ ID NO: 17960 - protein, 36 aa, Artificial sequence
  synthetic peptide
LERRDNYTKAEEILSRSIVKRWANFAKYGNPNETQN

SEQ ID NO: 17961 - protein, 36 aa, Artificial sequence
  synthetic peptide
ERRDNYTKAEEILSRSIVKRWANFAKYGNPNETQNN

SEQ ID NO: 17962 - protein, 36 aa, Artificial sequence
  synthetic peptide
RRDNYTKAEEILSRSIVKRWANFAKYGNPNETQNNS

SEQ ID NO: 17963 - protein, 36 aa, Artificial sequence
  synthetic peptide
RDNYTKAEEILSRSIVKRWANFAKYGNPNETQNNST

SEQ ID NO: 17964 - protein, 36 aa, Artificial sequence
  synthetic peptide
DNYTKAEEILSRSIVKRWANFAKYGNPNETQNNSTS

SEQ ID NO: 17965 - protein, 36 aa, Artificial sequence
  synthetic peptide
NYTKAEEILSRSIVKRWANFAKYGNPNETQNNSTSW

SEQ ID NO: 17966 - protein, 36 aa, Artificial sequence
  synthetic peptide
YTKAEEILSRSIVKRWANFAKYGNPNETQNNSTSWP

SEQ ID NO: 17967 - protein, 36 aa, Artificial sequence
  synthetic peptide
TKAEEILSRSIVKRWANFAKYGNPNETQNNSTSWPV

SEQ ID NO: 17968 - protein, 36 aa, Artificial sequence
  synthetic peptide
KAEEILSRSIVKRWANFAKYGNPNETQNNSTSWPVF

SEQ ID NO: 17969 - protein, 36 aa, Artificial sequence
  synthetic peptide
AEEILSRSIVKRWANFAKYGNPNETQNNSTSWPVFK

SEQ ID NO: 17970 - protein, 36 aa, Artificial sequence
  synthetic peptide
EEILSRSIVKRWANFAKYGNPNETQNNSTSWPVFKS

SEQ ID NO: 17971 - protein, 36 aa, Artificial sequence
  synthetic peptide
EILSRSIVKRWANFAKYGNPNETQNNSTSWPVFKST

SEQ ID NO: 17972 - protein, 36 aa, Artificial sequence
  synthetic peptide
ILSRSIVKRWANFAKYGNPNETQNNSTSWPVFKSTE

SEQ ID NO: 17973 - protein, 36 aa, Artificial sequence
  synthetic peptide
LSRSIVKRWANFAKYGNPNETQNNSTSWPVFKSTEQ

SEQ ID NO: 17974 - protein, 36 aa, Artificial sequence
  synthetic peptide
SRSIVKRWANFAKYGNPNETQNNSTSWPVFKSTEQK

SEQ ID NO: 17975 - protein, 36 aa, Artificial sequence
  synthetic peptide
RSIVKRWANFAKYGNPNETQNNSTSWPVFKSTEQKY

SEQ ID NO: 17976 - protein, 36 aa, Artificial sequence
  synthetic peptide
SIVKRWANFAKYGNPNETQNNSTSWPVFKSTEQKYL

SEQ ID NO: 17977 - protein, 36 aa, Artificial sequence
  synthetic peptide
IVKRWANFAKYGNPNETQNNSTSWPVFKSTEQKYLT

SEQ ID NO: 17978 - protein, 36 aa, Artificial sequence
  synthetic peptide
VKRWANFAKYGNPNETQNNSTSWPVFKSTEQKYLTL

SEQ ID NO: 17979 - protein, 36 aa, Artificial sequence
  synthetic peptide
KRWANFAKYGNPNETQNNSTSWPVFKSTEQKYLTLN

SEQ ID NO: 17980 - protein, 36 aa, Artificial sequence
  synthetic peptide
RWANFAKYGNPNETQNNSTSWPVFKSTEQKYLTLNT

SEQ ID NO: 17981 - protein, 36 aa, Artificial sequence
  synthetic peptide
WANFAKYGNPNETQNNSTSWPVFKSTEQKYLTLNTE

SEQ ID NO: 17982 - protein, 36 aa, Artificial sequence
  synthetic peptide
ANFAKYGNPNETQNNSTSWPVFKSTEQKYLTLNTES

SEQ ID NO: 17983 - protein, 36 aa, Artificial sequence
  synthetic peptide
NFAKYGNPNETQNNSTSWPVFKSTEQKYLTLNTEST

SEQ ID NO: 17984 - protein, 36 aa, Artificial sequence
  synthetic peptide
FAKYGNPNETQNNSTSWPVFKSTEQKYLTLNTESTR

SEQ ID NO: 17985 - protein, 36 aa, Artificial sequence
  synthetic peptide
AKYGNPNETQNNSTSWPVFKSTEQKYLTLNTESTRI

SEQ ID NO: 17986 - protein, 36 aa, Artificial sequence
  synthetic peptide
KYGNPNETQNNSTSWPVFKSTEQKYLTLNTESTRIM

SEQ ID NO: 17987 - protein, 36 aa, Artificial sequence
  synthetic peptide
YGNPNETQNNSTSWPVFKSTEQKYLTLNTESTRIMT

SEQ ID NO: 17988 - protein, 36 aa, Artificial sequence
  synthetic peptide
GNPNETQNNSTSWPVFKSTEQKYLTLNTESTRIMTK

SEQ ID NO: 17989 - protein, 36 aa, Artificial sequence
  synthetic peptide
NPNETQNNSTSWPVFKSTEQKYLTLNTESTRIMTKL

SEQ ID NO: 17990 - protein, 36 aa, Artificial sequence
  synthetic peptide
PNETQNNSTSWPVFKSTEQKYLTLNTESTRIMTKLR

SEQ ID NO: 17991 - protein, 36 aa, Artificial sequence
  synthetic peptide
NETQNNSTSWPVFKSTEQKYLTLNTESTRIMTKLRA

SEQ ID NO: 17992 - protein, 36 aa, Artificial sequence
  synthetic peptide
ETQNNSTSWPVFKSTEQKYLTLNTESTRIMTKLRAQ

SEQ ID NO: 17993 - protein, 36 aa, Artificial sequence
  synthetic peptide
TQNNSTSWPVFKSTEQKYLTLNTESTRIMTKLRAQQ

SEQ ID NO: 17994 - protein, 36 aa, Artificial sequence
  synthetic peptide
QNNSTSWPVFKSTEQKYLTLNTESTRIMTKLRAQQC

SEQ ID NO: 17995 - protein, 36 aa, Artificial sequence
  synthetic peptide
NNSTSWPVFKSTEQKYLTLNTESTRIMTKLRAQQCR

SEQ ID NO: 17996 - protein, 36 aa, Artificial sequence
  synthetic peptide
NSTSWPVFKSTEQKYLTLNTESTRIMTKLRAQQCRF

SEQ ID NO: 17997 - protein, 36 aa, Artificial sequence
  synthetic peptide
STSWPVFKSTEQKYLTLNTESTRIMTKLRAQQCRFW

SEQ ID NO: 17998 - protein, 36 aa, Artificial sequence
  synthetic peptide
TSWPVFKSTEQKYLTLNTESTRIMTKLRAQQCRFWT

SEQ ID NO: 17999 - protein, 36 aa, Artificial sequence
  synthetic peptide
SWPVFKSTEQKYLTLNTESTRIMTKLRAQQCRFWTS

SEQ ID NO: 18000 - protein, 36 aa, Artificial sequence
  synthetic peptide
WPVFKSTEQKYLTLNTESTRIMTKLRAQQCRFWTSF

SEQ ID NO: 18001 - protein, 36 aa, Artificial sequence
  synthetic peptide
PVFKSTEQKYLTLNTESTRIMTKLRAQQCRFWTSFF

SEQ ID NO: 18002 - protein, 36 aa, Artificial sequence
  synthetic peptide
VFKSTEQKYLTLNTESTRIMTKLRAQQCRFWTSFFP

SEQ ID NO: 18003 - protein, 36 aa, Artificial sequence
  synthetic peptide
FKSTEQKYLTLNTESTRIMTKLRAQQCRFWTSFFPK

SEQ ID NO: 18004 - protein, 36 aa, Artificial sequence
  synthetic peptide
KSTEQKYLTLNTESTRIMTKLRAQQCRFWTSFFPKV

SEQ ID NO: 18005 - protein, 36 aa, Artificial sequence
  synthetic peptide
STEQKYLTLNTESTRIMTKLRAQQCRFWTSFFPKVL

SEQ ID NO: 18006 - protein, 36 aa, Artificial sequence
  synthetic peptide
TEQKYLTLNTESTRIMTKLRAQQCRFWTSFFPKVLE

SEQ ID NO: 18007 - protein, 36 aa, Artificial sequence
  synthetic peptide
EQKYLTLNTESTRIMTKLRAQQCRFWTSFFPKVLEM

SEQ ID NO: 18008 - protein, 36 aa, Artificial sequence
  synthetic peptide
QKYLTLNTESTRIMTKLRAQQCRFWTSFFPKVLEMT

SEQ ID NO: 18009 - protein, 36 aa, Artificial sequence
  synthetic peptide
KYLTLNTESTRIMTKLRAQQCRFWTSFFPKVLEMTG

SEQ ID NO: 18010 - protein, 36 aa, Artificial sequence
  synthetic peptide
YLTLNTESTRIMTKLRAQQCRFWTSFFPKVLEMTGN

SEQ ID NO: 18011 - protein, 36 aa, Artificial sequence
  synthetic peptide
LTLNTESTRIMTKLRAQQCRFWTSFFPKVLEMTGNI

SEQ ID NO: 18012 - protein, 36 aa, Artificial sequence
  synthetic peptide
TLNTESTRIMTKLRAQQCRFWTSFFPKVLEMTGNID

SEQ ID NO: 18013 - protein, 36 aa, Artificial sequence
  synthetic peptide
LNTESTRIMTKLRAQQCRFWTSFFPKVLEMTGNIDE

SEQ ID NO: 18014 - protein, 36 aa, Artificial sequence
  synthetic peptide
NTESTRIMTKLRAQQCRFWTSFFPKVLEMTGNIDEA

SEQ ID NO: 18015 - protein, 36 aa, Artificial sequence
  synthetic peptide
TESTRIMTKLRAQQCRFWTSFFPKVLEMTGNIDEAE

SEQ ID NO: 18016 - protein, 36 aa, Artificial sequence
  synthetic peptide
ESTRIMTKLRAQQCRFWTSFFPKVLEMTGNIDEAEW

SEQ ID NO: 18017 - protein, 36 aa, Artificial sequence
  synthetic peptide
STRIMTKLRAQQCRFWTSFFPKVLEMTGNIDEAEWE

SEQ ID NO: 18018 - protein, 36 aa, Artificial sequence
  synthetic peptide
TRIMTKLRAQQCRFWTSFFPKVLEMTGNIDEAEWEW

SEQ ID NO: 18019 - protein, 36 aa, Artificial sequence
  synthetic peptide
RIMTKLRAQQCRFWTSFFPKVLEMTGNIDEAEWEWK

SEQ ID NO: 18020 - protein, 36 aa, Artificial sequence
  synthetic peptide
IMTKLRAQQCRFWTSFFPKVLEMTGNIDEAEWEWKA

SEQ ID NO: 18021 - protein, 36 aa, Artificial sequence
  synthetic peptide
MTKLRAQQCRFWTSFFPKVLEMTGNIDEAEWEWKAG

SEQ ID NO: 18022 - protein, 36 aa, Artificial sequence
  synthetic peptide
TKLRAQQCRFWTSFFPKVLEMTGNIDEAEWEWKAGF

SEQ ID NO: 18023 - protein, 36 aa, Artificial sequence
  synthetic peptide
KLRAQQCRFWTSFFPKVLEMTGNIDEAEWEWKAGFH

SEQ ID NO: 18024 - protein, 36 aa, Artificial sequence
  synthetic peptide
LRAQQCRFWTSFFPKVLEMTGNIDEAEWEWKAGFHR

SEQ ID NO: 18025 - protein, 36 aa, Artificial sequence
  synthetic peptide
RAQQCRFWTSFFPKVLEMTGNIDEAEWEWKAGFHRW

SEQ ID NO: 18026 - protein, 36 aa, Artificial sequence
  synthetic peptide
AQQCRFWTSFFPKVLEMTGNIDEAEWEWKAGFHRWN

SEQ ID NO: 18027 - protein, 36 aa, Artificial sequence
  synthetic peptide
QQCRFWTSFFPKVLEMTGNIDEAEWEWKAGFHRWNN

SEQ ID NO: 18028 - protein, 36 aa, Artificial sequence
  synthetic peptide
QCRFWTSFFPKVLEMTGNIDEAEWEWKAGFHRWNNY

SEQ ID NO: 18029 - protein, 36 aa, Artificial sequence
  synthetic peptide
CRFWTSFFPKVLEMTGNIDEAEWEWKAGFHRWNNYM

SEQ ID NO: 18030 - protein, 36 aa, Artificial sequence
  synthetic peptide
RFWTSFFPKVLEMTGNIDEAEWEWKAGFHRWNNYMM

SEQ ID NO: 18031 - protein, 36 aa, Artificial sequence
  synthetic peptide
FWTSFFPKVLEMTGNIDEAEWEWKAGFHRWNNYMMD

SEQ ID NO: 18032 - protein, 36 aa, Artificial sequence
  synthetic peptide
WTSFFPKVLEMTGNIDEAEWEWKAGFHRWNNYMMDW

SEQ ID NO: 18033 - protein, 36 aa, Artificial sequence
  synthetic peptide
TSFFPKVLEMTGNIDEAEWEWKAGFHRWNNYMMDWK

SEQ ID NO: 18034 - protein, 36 aa, Artificial sequence
  synthetic peptide
SFFPKVLEMTGNIDEAEWEWKAGFHRWNNYMMDWKN

SEQ ID NO: 18035 - protein, 36 aa, Artificial sequence
  synthetic peptide
FFPKVLEMTGNIDEAEWEWKAGFHRWNNYMMDWKNQ

SEQ ID NO: 18036 - protein, 36 aa, Artificial sequence
  synthetic peptide
FPKVLEMTGNIDEAEWEWKAGFHRWNNYMMDWKNQF

SEQ ID NO: 18037 - protein, 36 aa, Artificial sequence
  synthetic peptide
PKVLEMTGNIDEAEWEWKAGFHRWNNYMMDWKNQFN

SEQ ID NO: 18038 - protein, 36 aa, Artificial sequence
  synthetic peptide
KVLEMTGNIDEAEWEWKAGFHRWNNYMMDWKNQFND

SEQ ID NO: 18039 - protein, 36 aa, Artificial sequence
  synthetic peptide
VLEMTGNIDEAEWEWKAGFHRWNNYMMDWKNQFNDY

SEQ ID NO: 18040 - protein, 36 aa, Artificial sequence
  synthetic peptide
LEMTGNIDEAEWEWKAGFHRWNNYMMDWKNQFNDYT

SEQ ID NO: 18041 - protein, 36 aa, Artificial sequence
  synthetic peptide
EMTGNIDEAEWEWKAGFHRWNNYMMDWKNQFNDYTS

SEQ ID NO: 18042 - protein, 36 aa, Artificial sequence
  synthetic peptide
MTGNIDEAEWEWKAGFHRWNNYMMDWKNQFNDYTSK

SEQ ID NO: 18043 - protein, 36 aa, Artificial sequence
  synthetic peptide
TGNIDEAEWEWKAGFHRWNNYMMDWKNQFNDYTSKK

SEQ ID NO: 18044 - protein, 36 aa, Artificial sequence
  synthetic peptide
GNIDEAEWEWKAGFHRWNNYMMDWKNQFNDYTSKKE

SEQ ID NO: 18045 - protein, 36 aa, Artificial sequence
  synthetic peptide
NIDEAEWEWKAGFHRWNNYMMDWKNQFNDYTSKKES

SEQ ID NO: 18046 - protein, 36 aa, Artificial sequence
  synthetic peptide
IDEAEWEWKAGFHRWNNYMMDWKNQFNDYTSKKESC

SEQ ID NO: 18047 - protein, 36 aa, Artificial sequence
  synthetic peptide
DEAEWEWKAGFHRWNNYMMDWKNQFNDYTSKKESCV

SEQ ID NO: 18048 - protein, 36 aa, Artificial sequence
  synthetic peptide
EAEWEWKAGFHRWNNYMMDWKNQFNDYTSKKESCVG

SEQ ID NO: 18049 - protein, 36 aa, Artificial sequence
  synthetic peptide
AEWEWKAGFHRWNNYMMDWKNQFNDYTSKKESCVGL

SEQ ID NO: 18050 - protein, 37 aa, Artificial sequence
  synthetic peptide
MHSKVTIICIRFLFWFLLLCMLIGKSHTEDDIIIATK

SEQ ID NO: 18051 - protein, 37 aa, Artificial sequence
  synthetic peptide
HSKVTIICIRFLFWFLLLCMLIGKSHTEDDIIIATKN

SEQ ID NO: 18052 - protein, 37 aa, Artificial sequence
  synthetic peptide
SKVTIICIRFLFWFLLLCMLIGKSHTEDDIIIATKNG

SEQ ID NO: 18053 - protein, 37 aa, Artificial sequence
  synthetic peptide
KVTIICIRFLFWFLLLCMLIGKSHTEDDIIIATKNGK

SEQ ID NO: 18054 - protein, 37 aa, Artificial sequence
  synthetic peptide
VTIICIRFLFWFLLLCMLIGKSHTEDDIIIATKNGKV

SEQ ID NO: 18055 - protein, 37 aa, Artificial sequence
  synthetic peptide
TIICIRFLFWFLLLCMLIGKSHTEDDIIIATKNGKVR

SEQ ID NO: 18056 - protein, 37 aa, Artificial sequence
  synthetic peptide
IICIRFLFWFLLLCMLIGKSHTEDDIIIATKNGKVRG

SEQ ID NO: 18057 - protein, 37 aa, Artificial sequence
  synthetic peptide
ICIRFLFWFLLLCMLIGKSHTEDDIIIATKNGKVRGM

SEQ ID NO: 18058 - protein, 37 aa, Artificial sequence
  synthetic peptide
CIRFLFWFLLLCMLIGKSHTEDDIIIATKNGKVRGMN

SEQ ID NO: 18059 - protein, 37 aa, Artificial sequence
  synthetic peptide
IRFLFWFLLLCMLIGKSHTEDDIIIATKNGKVRGMNL

SEQ ID NO: 18060 - protein, 37 aa, Artificial sequence
  synthetic peptide
RFLFWFLLLCMLIGKSHTEDDIIIATKNGKVRGMNLT

SEQ ID NO: 18061 - protein, 37 aa, Artificial sequence
  synthetic peptide
FLFWFLLLCMLIGKSHTEDDIIIATKNGKVRGMNLTV

SEQ ID NO: 18062 - protein, 37 aa, Artificial sequence
  synthetic peptide
LFWFLLLCMLIGKSHTEDDIIIATKNGKVRGMNLTVF

SEQ ID NO: 18063 - protein, 37 aa, Artificial sequence
  synthetic peptide
FWFLLLCMLIGKSHTEDDIIIATKNGKVRGMNLTVFG

SEQ ID NO: 18064 - protein, 37 aa, Artificial sequence
  synthetic peptide
WFLLLCMLIGKSHTEDDIIIATKNGKVRGMNLTVFGG

SEQ ID NO: 18065 - protein, 37 aa, Artificial sequence
  synthetic peptide
FLLLCMLIGKSHTEDDIIIATKNGKVRGMNLTVFGGT

SEQ ID NO: 18066 - protein, 37 aa, Artificial sequence
  synthetic peptide
LLLCMLIGKSHTEDDIIIATKNGKVRGMNLTVFGGTV

SEQ ID NO: 18067 - protein, 37 aa, Artificial sequence
  synthetic peptide
LLCMLIGKSHTEDDIIIATKNGKVRGMNLTVFGGTVT

SEQ ID NO: 18068 - protein, 37 aa, Artificial sequence
  synthetic peptide
LCMLIGKSHTEDDIIIATKNGKVRGMNLTVFGGTVTA

SEQ ID NO: 18069 - protein, 37 aa, Artificial sequence
  synthetic peptide
CMLIGKSHTEDDIIIATKNGKVRGMNLTVFGGTVTAF

SEQ ID NO: 18070 - protein, 37 aa, Artificial sequence
  synthetic peptide
MLIGKSHTEDDIIIATKNGKVRGMNLTVFGGTVTAFL

SEQ ID NO: 18071 - protein, 37 aa, Artificial sequence
  synthetic peptide
LIGKSHTEDDIIIATKNGKVRGMNLTVFGGTVTAFLG

SEQ ID NO: 18072 - protein, 37 aa, Artificial sequence
  synthetic peptide
IGKSHTEDDIIIATKNGKVRGMNLTVFGGTVTAFLGI

SEQ ID NO: 18073 - protein, 37 aa, Artificial sequence
  synthetic peptide
GKSHTEDDIIIATKNGKVRGMNLTVFGGTVTAFLGIP

SEQ ID NO: 18074 - protein, 37 aa, Artificial sequence
  synthetic peptide
KSHTEDDIIIATKNGKVRGMNLTVFGGTVTAFLGIPY

SEQ ID NO: 18075 - protein, 37 aa, Artificial sequence
  synthetic peptide
SHTEDDIIIATKNGKVRGMNLTVFGGTVTAFLGIPYA

SEQ ID NO: 18076 - protein, 37 aa, Artificial sequence
  synthetic peptide
HTEDDIIIATKNGKVRGMNLTVFGGTVTAFLGIPYAQ

SEQ ID NO: 18077 - protein, 37 aa, Artificial sequence
  synthetic peptide
TEDDIIIATKNGKVRGMNLTVFGGTVTAFLGIPYAQP

SEQ ID NO: 18078 - protein, 37 aa, Artificial sequence
  synthetic peptide
EDDIIIATKNGKVRGMNLTVFGGTVTAFLGIPYAQPP

SEQ ID NO: 18079 - protein, 37 aa, Artificial sequence
  synthetic peptide
DDIIIATKNGKVRGMNLTVFGGTVTAFLGIPYAQPPL

SEQ ID NO: 18080 - protein, 37 aa, Artificial sequence
  synthetic peptide
DIIIATKNGKVRGMNLTVFGGTVTAFLGIPYAQPPLG

SEQ ID NO: 18081 - protein, 37 aa, Artificial sequence
  synthetic peptide
IIIATKNGKVRGMNLTVFGGTVTAFLGIPYAQPPLGR

SEQ ID NO: 18082 - protein, 37 aa, Artificial sequence
  synthetic peptide
IIATKNGKVRGMNLTVFGGTVTAFLGIPYAQPPLGRL

SEQ ID NO: 18083 - protein, 37 aa, Artificial sequence
  synthetic peptide
IATKNGKVRGMNLTVFGGTVTAFLGIPYAQPPLGRLR

SEQ ID NO: 18084 - protein, 37 aa, Artificial sequence
  synthetic peptide
ATKNGKVRGMNLTVFGGTVTAFLGIPYAQPPLGRLRF

SEQ ID NO: 18085 - protein, 37 aa, Artificial sequence
  synthetic peptide
TKNGKVRGMNLTVFGGTVTAFLGIPYAQPPLGRLRFK

SEQ ID NO: 18086 - protein, 37 aa, Artificial sequence
  synthetic peptide
KNGKVRGMNLTVFGGTVTAFLGIPYAQPPLGRLRFKK

SEQ ID NO: 18087 - protein, 37 aa, Artificial sequence
  synthetic peptide
NGKVRGMNLTVFGGTVTAFLGIPYAQPPLGRLRFKKP

SEQ ID NO: 18088 - protein, 37 aa, Artificial sequence
  synthetic peptide
GKVRGMNLTVFGGTVTAFLGIPYAQPPLGRLRFKKPQ

SEQ ID NO: 18089 - protein, 37 aa, Artificial sequence
  synthetic peptide
KVRGMNLTVFGGTVTAFLGIPYAQPPLGRLRFKKPQS

SEQ ID NO: 18090 - protein, 37 aa, Artificial sequence
  synthetic peptide
VRGMNLTVFGGTVTAFLGIPYAQPPLGRLRFKKPQSL

SEQ ID NO: 18091 - protein, 37 aa, Artificial sequence
  synthetic peptide
RGMNLTVFGGTVTAFLGIPYAQPPLGRLRFKKPQSLT

SEQ ID NO: 18092 - protein, 37 aa, Artificial sequence
  synthetic peptide
GMNLTVFGGTVTAFLGIPYAQPPLGRLRFKKPQSLTK

SEQ ID NO: 18093 - protein, 37 aa, Artificial sequence
  synthetic peptide
MNLTVFGGTVTAFLGIPYAQPPLGRLRFKKPQSLTKW

SEQ ID NO: 18094 - protein, 37 aa, Artificial sequence
  synthetic peptide
NLTVFGGTVTAFLGIPYAQPPLGRLRFKKPQSLTKWS

SEQ ID NO: 18095 - protein, 37 aa, Artificial sequence
  synthetic peptide
LTVFGGTVTAFLGIPYAQPPLGRLRFKKPQSLTKWSD

SEQ ID NO: 18096 - protein, 37 aa, Artificial sequence
  synthetic peptide
TVFGGTVTAFLGIPYAQPPLGRLRFKKPQSLTKWSDI

SEQ ID NO: 18097 - protein, 37 aa, Artificial sequence
  synthetic peptide
VFGGTVTAFLGIPYAQPPLGRLRFKKPQSLTKWSDIW

SEQ ID NO: 18098 - protein, 37 aa, Artificial sequence
  synthetic peptide
FGGTVTAFLGIPYAQPPLGRLRFKKPQSLTKWSDIWN

SEQ ID NO: 18099 - protein, 37 aa, Artificial sequence
  synthetic peptide
GGTVTAFLGIPYAQPPLGRLRFKKPQSLTKWSDIWNA

SEQ ID NO: 18100 - protein, 37 aa, Artificial sequence
  synthetic peptide
GTVTAFLGIPYAQPPLGRLRFKKPQSLTKWSDIWNAT

SEQ ID NO: 18101 - protein, 37 aa, Artificial sequence
  synthetic peptide
TVTAFLGIPYAQPPLGRLRFKKPQSLTKWSDIWNATK

SEQ ID NO: 18102 - protein, 37 aa, Artificial sequence
  synthetic peptide
VTAFLGIPYAQPPLGRLRFKKPQSLTKWSDIWNATKY

SEQ ID NO: 18103 - protein, 37 aa, Artificial sequence
  synthetic peptide
TAFLGIPYAQPPLGRLRFKKPQSLTKWSDIWNATKYA

SEQ ID NO: 18104 - protein, 37 aa, Artificial sequence
  synthetic peptide
AFLGIPYAQPPLGRLRFKKPQSLTKWSDIWNATKYAN

SEQ ID NO: 18105 - protein, 37 aa, Artificial sequence
  synthetic peptide
FLGIPYAQPPLGRLRFKKPQSLTKWSDIWNATKYANS

SEQ ID NO: 18106 - protein, 37 aa, Artificial sequence
  synthetic peptide
LGIPYAQPPLGRLRFKKPQSLTKWSDIWNATKYANSC

SEQ ID NO: 18107 - protein, 37 aa, Artificial sequence
  synthetic peptide
GIPYAQPPLGRLRFKKPQSLTKWSDIWNATKYANSCC

SEQ ID NO: 18108 - protein, 37 aa, Artificial sequence
  synthetic peptide
IPYAQPPLGRLRFKKPQSLTKWSDIWNATKYANSCCQ

SEQ ID NO: 18109 - protein, 37 aa, Artificial sequence
  synthetic peptide
PYAQPPLGRLRFKKPQSLTKWSDIWNATKYANSCCQN

SEQ ID NO: 18110 - protein, 37 aa, Artificial sequence
  synthetic peptide
YAQPPLGRLRFKKPQSLTKWSDIWNATKYANSCCQNI

SEQ ID NO: 18111 - protein, 37 aa, Artificial sequence
  synthetic peptide
AQPPLGRLRFKKPQSLTKWSDIWNATKYANSCCQNID

SEQ ID NO: 18112 - protein, 37 aa, Artificial sequence
  synthetic peptide
QPPLGRLRFKKPQSLTKWSDIWNATKYANSCCQNIDQ

SEQ ID NO: 18113 - protein, 37 aa, Artificial sequence
  synthetic peptide
PPLGRLRFKKPQSLTKWSDIWNATKYANSCCQNIDQS

SEQ ID NO: 18114 - protein, 37 aa, Artificial sequence
  synthetic peptide
PLGRLRFKKPQSLTKWSDIWNATKYANSCCQNIDQSF

SEQ ID NO: 18115 - protein, 37 aa, Artificial sequence
  synthetic peptide
LGRLRFKKPQSLTKWSDIWNATKYANSCCQNIDQSFP

SEQ ID NO: 18116 - protein, 37 aa, Artificial sequence
  synthetic peptide
GRLRFKKPQSLTKWSDIWNATKYANSCCQNIDQSFPG

SEQ ID NO: 18117 - protein, 37 aa, Artificial sequence
  synthetic peptide
RLRFKKPQSLTKWSDIWNATKYANSCCQNIDQSFPGF

SEQ ID NO: 18118 - protein, 37 aa, Artificial sequence
  synthetic peptide
LRFKKPQSLTKWSDIWNATKYANSCCQNIDQSFPGFH

SEQ ID NO: 18119 - protein, 37 aa, Artificial sequence
  synthetic peptide
RFKKPQSLTKWSDIWNATKYANSCCQNIDQSFPGFHG

SEQ ID NO: 18120 - protein, 37 aa, Artificial sequence
  synthetic peptide
FKKPQSLTKWSDIWNATKYANSCCQNIDQSFPGFHGS

SEQ ID NO: 18121 - protein, 37 aa, Artificial sequence
  synthetic peptide
KKPQSLTKWSDIWNATKYANSCCQNIDQSFPGFHGSE

SEQ ID NO: 18122 - protein, 37 aa, Artificial sequence
  synthetic peptide
KPQSLTKWSDIWNATKYANSCCQNIDQSFPGFHGSEM

SEQ ID NO: 18123 - protein, 37 aa, Artificial sequence
  synthetic peptide
PQSLTKWSDIWNATKYANSCCQNIDQSFPGFHGSEMW

SEQ ID NO: 18124 - protein, 37 aa, Artificial sequence
  synthetic peptide
QSLTKWSDIWNATKYANSCCQNIDQSFPGFHGSEMWN

SEQ ID NO: 18125 - protein, 37 aa, Artificial sequence
  synthetic peptide
SLTKWSDIWNATKYANSCCQNIDQSFPGFHGSEMWNP

SEQ ID NO: 18126 - protein, 37 aa, Artificial sequence
  synthetic peptide
LTKWSDIWNATKYANSCCQNIDQSFPGFHGSEMWNPN

SEQ ID NO: 18127 - protein, 37 aa, Artificial sequence
  synthetic peptide
TKWSDIWNATKYANSCCQNIDQSFPGFHGSEMWNPNT

SEQ ID NO: 18128 - protein, 37 aa, Artificial sequence
  synthetic peptide
KWSDIWNATKYANSCCQNIDQSFPGFHGSEMWNPNTD

SEQ ID NO: 18129 - protein, 37 aa, Artificial sequence
  synthetic peptide
WSDIWNATKYANSCCQNIDQSFPGFHGSEMWNPNTDL

SEQ ID NO: 18130 - protein, 37 aa, Artificial sequence
  synthetic peptide
SDIWNATKYANSCCQNIDQSFPGFHGSEMWNPNTDLS

SEQ ID NO: 18131 - protein, 37 aa, Artificial sequence
  synthetic peptide
DIWNATKYANSCCQNIDQSFPGFHGSEMWNPNTDLSE

SEQ ID NO: 18132 - protein, 37 aa, Artificial sequence
  synthetic peptide
IWNATKYANSCCQNIDQSFPGFHGSEMWNPNTDLSED

SEQ ID NO: 18133 - protein, 37 aa, Artificial sequence
  synthetic peptide
WNATKYANSCCQNIDQSFPGFHGSEMWNPNTDLSEDC

SEQ ID NO: 18134 - protein, 37 aa, Artificial sequence
  synthetic peptide
NATKYANSCCQNIDQSFPGFHGSEMWNPNTDLSEDCL

SEQ ID NO: 18135 - protein, 37 aa, Artificial sequence
  synthetic peptide
ATKYANSCCQNIDQSFPGFHGSEMWNPNTDLSEDCLY

SEQ ID NO: 18136 - protein, 37 aa, Artificial sequence
  synthetic peptide
TKYANSCCQNIDQSFPGFHGSEMWNPNTDLSEDCLYL

SEQ ID NO: 18137 - protein, 37 aa, Artificial sequence
  synthetic peptide
KYANSCCQNIDQSFPGFHGSEMWNPNTDLSEDCLYLN

SEQ ID NO: 18138 - protein, 37 aa, Artificial sequence
  synthetic peptide
YANSCCQNIDQSFPGFHGSEMWNPNTDLSEDCLYLNV

SEQ ID NO: 18139 - protein, 37 aa, Artificial sequence
  synthetic peptide
ANSCCQNIDQSFPGFHGSEMWNPNTDLSEDCLYLNVW

SEQ ID NO: 18140 - protein, 37 aa, Artificial sequence
  synthetic peptide
NSCCQNIDQSFPGFHGSEMWNPNTDLSEDCLYLNVWI

SEQ ID NO: 18141 - protein, 37 aa, Artificial sequence
  synthetic peptide
SCCQNIDQSFPGFHGSEMWNPNTDLSEDCLYLNVWIP

SEQ ID NO: 18142 - protein, 37 aa, Artificial sequence
  synthetic peptide
CCQNIDQSFPGFHGSEMWNPNTDLSEDCLYLNVWIPA

SEQ ID NO: 18143 - protein, 37 aa, Artificial sequence
  synthetic peptide
CQNIDQSFPGFHGSEMWNPNTDLSEDCLYLNVWIPAP

SEQ ID NO: 18144 - protein, 37 aa, Artificial sequence
  synthetic peptide
QNIDQSFPGFHGSEMWNPNTDLSEDCLYLNVWIPAPK

SEQ ID NO: 18145 - protein, 37 aa, Artificial sequence
  synthetic peptide
NIDQSFPGFHGSEMWNPNTDLSEDCLYLNVWIPAPKP

SEQ ID NO: 18146 - protein, 37 aa, Artificial sequence
  synthetic peptide
IDQSFPGFHGSEMWNPNTDLSEDCLYLNVWIPAPKPK

SEQ ID NO: 18147 - protein, 37 aa, Artificial sequence
  synthetic peptide
DQSFPGFHGSEMWNPNTDLSEDCLYLNVWIPAPKPKN

SEQ ID NO: 18148 - protein, 37 aa, Artificial sequence
  synthetic peptide
QSFPGFHGSEMWNPNTDLSEDCLYLNVWIPAPKPKNA

SEQ ID NO: 18149 - protein, 37 aa, Artificial sequence
  synthetic peptide
SFPGFHGSEMWNPNTDLSEDCLYLNVWIPAPKPKNAT

SEQ ID NO: 18150 - protein, 37 aa, Artificial sequence
  synthetic peptide
FPGFHGSEMWNPNTDLSEDCLYLNVWIPAPKPKNATV

SEQ ID NO: 18151 - protein, 37 aa, Artificial sequence
  synthetic peptide
PGFHGSEMWNPNTDLSEDCLYLNVWIPAPKPKNATVL

SEQ ID NO: 18152 - protein, 37 aa, Artificial sequence
  synthetic peptide
GFHGSEMWNPNTDLSEDCLYLNVWIPAPKPKNATVLI

SEQ ID NO: 18153 - protein, 37 aa, Artificial sequence
  synthetic peptide
FHGSEMWNPNTDLSEDCLYLNVWIPAPKPKNATVLIW

SEQ ID NO: 18154 - protein, 37 aa, Artificial sequence
  synthetic peptide
HGSEMWNPNTDLSEDCLYLNVWIPAPKPKNATVLIWI

SEQ ID NO: 18155 - protein, 37 aa, Artificial sequence
  synthetic peptide
GSEMWNPNTDLSEDCLYLNVWIPAPKPKNATVLIWIY

SEQ ID NO: 18156 - protein, 37 aa, Artificial sequence
  synthetic peptide
SEMWNPNTDLSEDCLYLNVWIPAPKPKNATVLIWIYG

SEQ ID NO: 18157 - protein, 37 aa, Artificial sequence
  synthetic peptide
EMWNPNTDLSEDCLYLNVWIPAPKPKNATVLIWIYGG

SEQ ID NO: 18158 - protein, 37 aa, Artificial sequence
  synthetic peptide
MWNPNTDLSEDCLYLNVWIPAPKPKNATVLIWIYGGG

SEQ ID NO: 18159 - protein, 37 aa, Artificial sequence
  synthetic peptide
WNPNTDLSEDCLYLNVWIPAPKPKNATVLIWIYGGGF

SEQ ID NO: 18160 - protein, 37 aa, Artificial sequence
  synthetic peptide
NPNTDLSEDCLYLNVWIPAPKPKNATVLIWIYGGGFQ

SEQ ID NO: 18161 - protein, 37 aa, Artificial sequence
  synthetic peptide
PNTDLSEDCLYLNVWIPAPKPKNATVLIWIYGGGFQT

SEQ ID NO: 18162 - protein, 37 aa, Artificial sequence
  synthetic peptide
NTDLSEDCLYLNVWIPAPKPKNATVLIWIYGGGFQTG

SEQ ID NO: 18163 - protein, 37 aa, Artificial sequence
  synthetic peptide
TDLSEDCLYLNVWIPAPKPKNATVLIWIYGGGFQTGT

SEQ ID NO: 18164 - protein, 37 aa, Artificial sequence
  synthetic peptide
DLSEDCLYLNVWIPAPKPKNATVLIWIYGGGFQTGTS

SEQ ID NO: 18165 - protein, 37 aa, Artificial sequence
  synthetic peptide
LSEDCLYLNVWIPAPKPKNATVLIWIYGGGFQTGTSS

SEQ ID NO: 18166 - protein, 37 aa, Artificial sequence
  synthetic peptide
SEDCLYLNVWIPAPKPKNATVLIWIYGGGFQTGTSSL

SEQ ID NO: 18167 - protein, 37 aa, Artificial sequence
  synthetic peptide
EDCLYLNVWIPAPKPKNATVLIWIYGGGFQTGTSSLH

SEQ ID NO: 18168 - protein, 37 aa, Artificial sequence
  synthetic peptide
DCLYLNVWIPAPKPKNATVLIWIYGGGFQTGTSSLHV

SEQ ID NO: 18169 - protein, 37 aa, Artificial sequence
  synthetic peptide
CLYLNVWIPAPKPKNATVLIWIYGGGFQTGTSSLHVY

SEQ ID NO: 18170 - protein, 37 aa, Artificial sequence
  synthetic peptide
LYLNVWIPAPKPKNATVLIWIYGGGFQTGTSSLHVYD

SEQ ID NO: 18171 - protein, 37 aa, Artificial sequence
  synthetic peptide
YLNVWIPAPKPKNATVLIWIYGGGFQTGTSSLHVYDG

SEQ ID NO: 18172 - protein, 37 aa, Artificial sequence
  synthetic peptide
LNVWIPAPKPKNATVLIWIYGGGFQTGTSSLHVYDGK

SEQ ID NO: 18173 - protein, 37 aa, Artificial sequence
  synthetic peptide
NVWIPAPKPKNATVLIWIYGGGFQTGTSSLHVYDGKF

SEQ ID NO: 18174 - protein, 37 aa, Artificial sequence
  synthetic peptide
VWIPAPKPKNATVLIWIYGGGFQTGTSSLHVYDGKFL

SEQ ID NO: 18175 - protein, 37 aa, Artificial sequence
  synthetic peptide
WIPAPKPKNATVLIWIYGGGFQTGTSSLHVYDGKFLA

SEQ ID NO: 18176 - protein, 37 aa, Artificial sequence
  synthetic peptide
IPAPKPKNATVLIWIYGGGFQTGTSSLHVYDGKFLAR

SEQ ID NO: 18177 - protein, 37 aa, Artificial sequence
  synthetic peptide
PAPKPKNATVLIWIYGGGFQTGTSSLHVYDGKFLARV

SEQ ID NO: 18178 - protein, 37 aa, Artificial sequence
  synthetic peptide
APKPKNATVLIWIYGGGFQTGTSSLHVYDGKFLARVE

SEQ ID NO: 18179 - protein, 37 aa, Artificial sequence
  synthetic peptide
PKPKNATVLIWIYGGGFQTGTSSLHVYDGKFLARVER

SEQ ID NO: 18180 - protein, 37 aa, Artificial sequence
  synthetic peptide
KPKNATVLIWIYGGGFQTGTSSLHVYDGKFLARVERV

SEQ ID NO: 18181 - protein, 37 aa, Artificial sequence
  synthetic peptide
PKNATVLIWIYGGGFQTGTSSLHVYDGKFLARVERVI

SEQ ID NO: 18182 - protein, 37 aa, Artificial sequence
  synthetic peptide
KNATVLIWIYGGGFQTGTSSLHVYDGKFLARVERVIV

SEQ ID NO: 18183 - protein, 37 aa, Artificial sequence
  synthetic peptide
NATVLIWIYGGGFQTGTSSLHVYDGKFLARVERVIVV

SEQ ID NO: 18184 - protein, 37 aa, Artificial sequence
  synthetic peptide
ATVLIWIYGGGFQTGTSSLHVYDGKFLARVERVIVVS

SEQ ID NO: 18185 - protein, 37 aa, Artificial sequence
  synthetic peptide
TVLIWIYGGGFQTGTSSLHVYDGKFLARVERVIVVSM

SEQ ID NO: 18186 - protein, 37 aa, Artificial sequence
  synthetic peptide
VLIWIYGGGFQTGTSSLHVYDGKFLARVERVIVVSMN

SEQ ID NO: 18187 - protein, 37 aa, Artificial sequence
  synthetic peptide
LIWIYGGGFQTGTSSLHVYDGKFLARVERVIVVSMNY

SEQ ID NO: 18188 - protein, 37 aa, Artificial sequence
  synthetic peptide
IWIYGGGFQTGTSSLHVYDGKFLARVERVIVVSMNYR

SEQ ID NO: 18189 - protein, 37 aa, Artificial sequence
  synthetic peptide
WIYGGGFQTGTSSLHVYDGKFLARVERVIVVSMNYRV

SEQ ID NO: 18190 - protein, 37 aa, Artificial sequence
  synthetic peptide
IYGGGFQTGTSSLHVYDGKFLARVERVIVVSMNYRVG

SEQ ID NO: 18191 - protein, 37 aa, Artificial sequence
  synthetic peptide
YGGGFQTGTSSLHVYDGKFLARVERVIVVSMNYRVGA

SEQ ID NO: 18192 - protein, 37 aa, Artificial sequence
  synthetic peptide
GGGFQTGTSSLHVYDGKFLARVERVIVVSMNYRVGAL

SEQ ID NO: 18193 - protein, 37 aa, Artificial sequence
  synthetic peptide
GGFQTGTSSLHVYDGKFLARVERVIVVSMNYRVGALG

SEQ ID NO: 18194 - protein, 37 aa, Artificial sequence
  synthetic peptide
GFQTGTSSLHVYDGKFLARVERVIVVSMNYRVGALGF

SEQ ID NO: 18195 - protein, 37 aa, Artificial sequence
  synthetic peptide
FQTGTSSLHVYDGKFLARVERVIVVSMNYRVGALGFL

SEQ ID NO: 18196 - protein, 37 aa, Artificial sequence
  synthetic peptide
QTGTSSLHVYDGKFLARVERVIVVSMNYRVGALGFLA

SEQ ID NO: 18197 - protein, 37 aa, Artificial sequence
  synthetic peptide
TGTSSLHVYDGKFLARVERVIVVSMNYRVGALGFLAL

SEQ ID NO: 18198 - protein, 37 aa, Artificial sequence
  synthetic peptide
GTSSLHVYDGKFLARVERVIVVSMNYRVGALGFLALP

SEQ ID NO: 18199 - protein, 37 aa, Artificial sequence
  synthetic peptide
TSSLHVYDGKFLARVERVIVVSMNYRVGALGFLALPG

SEQ ID NO: 18200 - protein, 37 aa, Artificial sequence
  synthetic peptide
SSLHVYDGKFLARVERVIVVSMNYRVGALGFLALPGN

SEQ ID NO: 18201 - protein, 37 aa, Artificial sequence
  synthetic peptide
SLHVYDGKFLARVERVIVVSMNYRVGALGFLALPGNP

SEQ ID NO: 18202 - protein, 37 aa, Artificial sequence
  synthetic peptide
LHVYDGKFLARVERVIVVSMNYRVGALGFLALPGNPE

SEQ ID NO: 18203 - protein, 37 aa, Artificial sequence
  synthetic peptide
HVYDGKFLARVERVIVVSMNYRVGALGFLALPGNPEA

SEQ ID NO: 18204 - protein, 37 aa, Artificial sequence
  synthetic peptide
VYDGKFLARVERVIVVSMNYRVGALGFLALPGNPEAP

SEQ ID NO: 18205 - protein, 37 aa, Artificial sequence
  synthetic peptide
YDGKFLARVERVIVVSMNYRVGALGFLALPGNPEAPG

SEQ ID NO: 18206 - protein, 37 aa, Artificial sequence
  synthetic peptide
DGKFLARVERVIVVSMNYRVGALGFLALPGNPEAPGN

SEQ ID NO: 18207 - protein, 37 aa, Artificial sequence
  synthetic peptide
GKFLARVERVIVVSMNYRVGALGFLALPGNPEAPGNM

SEQ ID NO: 18208 - protein, 37 aa, Artificial sequence
  synthetic peptide
KFLARVERVIVVSMNYRVGALGFLALPGNPEAPGNMG

SEQ ID NO: 18209 - protein, 37 aa, Artificial sequence
  synthetic peptide
FLARVERVIVVSMNYRVGALGFLALPGNPEAPGNMGL

SEQ ID NO: 18210 - protein, 37 aa, Artificial sequence
  synthetic peptide
LARVERVIVVSMNYRVGALGFLALPGNPEAPGNMGLF

SEQ ID NO: 18211 - protein, 37 aa, Artificial sequence
  synthetic peptide
ARVERVIVVSMNYRVGALGFLALPGNPEAPGNMGLFD

SEQ ID NO: 18212 - protein, 37 aa, Artificial sequence
  synthetic peptide
RVERVIVVSMNYRVGALGFLALPGNPEAPGNMGLFDQ

SEQ ID NO: 18213 - protein, 37 aa, Artificial sequence
  synthetic peptide
VERVIVVSMNYRVGALGFLALPGNPEAPGNMGLFDQQ

SEQ ID NO: 18214 - protein, 37 aa, Artificial sequence
  synthetic peptide
ERVIVVSMNYRVGALGFLALPGNPEAPGNMGLFDQQL

SEQ ID NO: 18215 - protein, 37 aa, Artificial sequence
  synthetic peptide
RVIVVSMNYRVGALGFLALPGNPEAPGNMGLFDQQLA

SEQ ID NO: 18216 - protein, 37 aa, Artificial sequence
  synthetic peptide
VIVVSMNYRVGALGFLALPGNPEAPGNMGLFDQQLAL

SEQ ID NO: 18217 - protein, 37 aa, Artificial sequence
  synthetic peptide
IVVSMNYRVGALGFLALPGNPEAPGNMGLFDQQLALQ

SEQ ID NO: 18218 - protein, 37 aa, Artificial sequence
  synthetic peptide
VVSMNYRVGALGFLALPGNPEAPGNMGLFDQQLALQW

SEQ ID NO: 18219 - protein, 37 aa, Artificial sequence
  synthetic peptide
VSMNYRVGALGFLALPGNPEAPGNMGLFDQQLALQWV

SEQ ID NO: 18220 - protein, 37 aa, Artificial sequence
  synthetic peptide
SMNYRVGALGFLALPGNPEAPGNMGLFDQQLALQWVQ

SEQ ID NO: 18221 - protein, 37 aa, Artificial sequence
  synthetic peptide
MNYRVGALGFLALPGNPEAPGNMGLFDQQLALQWVQK

SEQ ID NO: 18222 - protein, 37 aa, Artificial sequence
  synthetic peptide
NYRVGALGFLALPGNPEAPGNMGLFDQQLALQWVQKN

SEQ ID NO: 18223 - protein, 37 aa, Artificial sequence
  synthetic peptide
YRVGALGFLALPGNPEAPGNMGLFDQQLALQWVQKNI

SEQ ID NO: 18224 - protein, 37 aa, Artificial sequence
  synthetic peptide
RVGALGFLALPGNPEAPGNMGLFDQQLALQWVQKNIA

SEQ ID NO: 18225 - protein, 37 aa, Artificial sequence
  synthetic peptide
VGALGFLALPGNPEAPGNMGLFDQQLALQWVQKNIAA

SEQ ID NO: 18226 - protein, 37 aa, Artificial sequence
  synthetic peptide
GALGFLALPGNPEAPGNMGLFDQQLALQWVQKNIAAF

SEQ ID NO: 18227 - protein, 37 aa, Artificial sequence
  synthetic peptide
ALGFLALPGNPEAPGNMGLFDQQLALQWVQKNIAAFG

SEQ ID NO: 18228 - protein, 37 aa, Artificial sequence
  synthetic peptide
LGFLALPGNPEAPGNMGLFDQQLALQWVQKNIAAFGG

SEQ ID NO: 18229 - protein, 37 aa, Artificial sequence
  synthetic peptide
GFLALPGNPEAPGNMGLFDQQLALQWVQKNIAAFGGN

SEQ ID NO: 18230 - protein, 37 aa, Artificial sequence
  synthetic peptide
FLALPGNPEAPGNMGLFDQQLALQWVQKNIAAFGGNP

SEQ ID NO: 18231 - protein, 37 aa, Artificial sequence
  synthetic peptide
LALPGNPEAPGNMGLFDQQLALQWVQKNIAAFGGNPK

SEQ ID NO: 18232 - protein, 37 aa, Artificial sequence
  synthetic peptide
ALPGNPEAPGNMGLFDQQLALQWVQKNIAAFGGNPKS

SEQ ID NO: 18233 - protein, 37 aa, Artificial sequence
  synthetic peptide
LPGNPEAPGNMGLFDQQLALQWVQKNIAAFGGNPKSV

SEQ ID NO: 18234 - protein, 37 aa, Artificial sequence
  synthetic peptide
PGNPEAPGNMGLFDQQLALQWVQKNIAAFGGNPKSVT

SEQ ID NO: 18235 - protein, 37 aa, Artificial sequence
  synthetic peptide
GNPEAPGNMGLFDQQLALQWVQKNIAAFGGNPKSVTL

SEQ ID NO: 18236 - protein, 37 aa, Artificial sequence
  synthetic peptide
NPEAPGNMGLFDQQLALQWVQKNIAAFGGNPKSVTLF

SEQ ID NO: 18237 - protein, 37 aa, Artificial sequence
  synthetic peptide
PEAPGNMGLFDQQLALQWVQKNIAAFGGNPKSVTLFG

SEQ ID NO: 18238 - protein, 37 aa, Artificial sequence
  synthetic peptide
EAPGNMGLFDQQLALQWVQKNIAAFGGNPKSVTLFGE

SEQ ID NO: 18239 - protein, 37 aa, Artificial sequence
  synthetic peptide
APGNMGLFDQQLALQWVQKNIAAFGGNPKSVTLFGES

SEQ ID NO: 18240 - protein, 37 aa, Artificial sequence
  synthetic peptide
PGNMGLFDQQLALQWVQKNIAAFGGNPKSVTLFGESA

SEQ ID NO: 18241 - protein, 37 aa, Artificial sequence
  synthetic peptide
GNMGLFDQQLALQWVQKNIAAFGGNPKSVTLFGESAG

SEQ ID NO: 18242 - protein, 37 aa, Artificial sequence
  synthetic peptide
NMGLFDQQLALQWVQKNIAAFGGNPKSVTLFGESAGA

SEQ ID NO: 18243 - protein, 37 aa, Artificial sequence
  synthetic peptide
MGLFDQQLALQWVQKNIAAFGGNPKSVTLFGESAGAA

SEQ ID NO: 18244 - protein, 37 aa, Artificial sequence
  synthetic peptide
GLFDQQLALQWVQKNIAAFGGNPKSVTLFGESAGAAS

SEQ ID NO: 18245 - protein, 37 aa, Artificial sequence
  synthetic peptide
LFDQQLALQWVQKNIAAFGGNPKSVTLFGESAGAASV

SEQ ID NO: 18246 - protein, 37 aa, Artificial sequence
  synthetic peptide
FDQQLALQWVQKNIAAFGGNPKSVTLFGESAGAASVS

SEQ ID NO: 18247 - protein, 37 aa, Artificial sequence
  synthetic peptide
DQQLALQWVQKNIAAFGGNPKSVTLFGESAGAASVSL

SEQ ID NO: 18248 - protein, 37 aa, Artificial sequence
  synthetic peptide
QQLALQWVQKNIAAFGGNPKSVTLFGESAGAASVSLH

SEQ ID NO: 18249 - protein, 37 aa, Artificial sequence
  synthetic peptide
QLALQWVQKNIAAFGGNPKSVTLFGESAGAASVSLHL

SEQ ID NO: 18250 - protein, 37 aa, Artificial sequence
  synthetic peptide
LALQWVQKNIAAFGGNPKSVTLFGESAGAASVSLHLL

SEQ ID NO: 18251 - protein, 37 aa, Artificial sequence
  synthetic peptide
ALQWVQKNIAAFGGNPKSVTLFGESAGAASVSLHLLS

SEQ ID NO: 18252 - protein, 37 aa, Artificial sequence
  synthetic peptide
LQWVQKNIAAFGGNPKSVTLFGESAGAASVSLHLLSP

SEQ ID NO: 18253 - protein, 37 aa, Artificial sequence
  synthetic peptide
QWVQKNIAAFGGNPKSVTLFGESAGAASVSLHLLSPG

SEQ ID NO: 18254 - protein, 37 aa, Artificial sequence
  synthetic peptide
WVQKNIAAFGGNPKSVTLFGESAGAASVSLHLLSPGS

SEQ ID NO: 18255 - protein, 37 aa, Artificial sequence
  synthetic peptide
VQKNIAAFGGNPKSVTLFGESAGAASVSLHLLSPGSH

SEQ ID NO: 18256 - protein, 37 aa, Artificial sequence
  synthetic peptide
QKNIAAFGGNPKSVTLFGESAGAASVSLHLLSPGSHS

SEQ ID NO: 18257 - protein, 37 aa, Artificial sequence
  synthetic peptide
KNIAAFGGNPKSVTLFGESAGAASVSLHLLSPGSHSL

SEQ ID NO: 18258 - protein, 37 aa, Artificial sequence
  synthetic peptide
NIAAFGGNPKSVTLFGESAGAASVSLHLLSPGSHSLF

SEQ ID NO: 18259 - protein, 37 aa, Artificial sequence
  synthetic peptide
IAAFGGNPKSVTLFGESAGAASVSLHLLSPGSHSLFT

SEQ ID NO: 18260 - protein, 37 aa, Artificial sequence
  synthetic peptide
AAFGGNPKSVTLFGESAGAASVSLHLLSPGSHSLFTR

SEQ ID NO: 18261 - protein, 37 aa, Artificial sequence
  synthetic peptide
AFGGNPKSVTLFGESAGAASVSLHLLSPGSHSLFTRA

SEQ ID NO: 18262 - protein, 37 aa, Artificial sequence
  synthetic peptide
FGGNPKSVTLFGESAGAASVSLHLLSPGSHSLFTRAI

SEQ ID NO: 18263 - protein, 37 aa, Artificial sequence
  synthetic peptide
GGNPKSVTLFGESAGAASVSLHLLSPGSHSLFTRAIL

SEQ ID NO: 18264 - protein, 37 aa, Artificial sequence
  synthetic peptide
GNPKSVTLFGESAGAASVSLHLLSPGSHSLFTRAILQ

SEQ ID NO: 18265 - protein, 37 aa, Artificial sequence
  synthetic peptide
NPKSVTLFGESAGAASVSLHLLSPGSHSLFTRAILQS

SEQ ID NO: 18266 - protein, 37 aa, Artificial sequence
  synthetic peptide
PKSVTLFGESAGAASVSLHLLSPGSHSLFTRAILQSG

SEQ ID NO: 18267 - protein, 37 aa, Artificial sequence
  synthetic peptide
KSVTLFGESAGAASVSLHLLSPGSHSLFTRAILQSGS

SEQ ID NO: 18268 - protein, 37 aa, Artificial sequence
  synthetic peptide
SVTLFGESAGAASVSLHLLSPGSHSLFTRAILQSGSF

SEQ ID NO: 18269 - protein, 37 aa, Artificial sequence
  synthetic peptide
VTLFGESAGAASVSLHLLSPGSHSLFTRAILQSGSFN

SEQ ID NO: 18270 - protein, 37 aa, Artificial sequence
  synthetic peptide
TLFGESAGAASVSLHLLSPGSHSLFTRAILQSGSFNA

SEQ ID NO: 18271 - protein, 37 aa, Artificial sequence
  synthetic peptide
LFGESAGAASVSLHLLSPGSHSLFTRAILQSGSFNAP

SEQ ID NO: 18272 - protein, 37 aa, Artificial sequence
  synthetic peptide
FGESAGAASVSLHLLSPGSHSLFTRAILQSGSFNAPW

SEQ ID NO: 18273 - protein, 37 aa, Artificial sequence
  synthetic peptide
GESAGAASVSLHLLSPGSHSLFTRAILQSGSFNAPWA

SEQ ID NO: 18274 - protein, 37 aa, Artificial sequence
  synthetic peptide
ESAGAASVSLHLLSPGSHSLFTRAILQSGSFNAPWAV

SEQ ID NO: 18275 - protein, 37 aa, Artificial sequence
  synthetic peptide
SAGAASVSLHLLSPGSHSLFTRAILQSGSFNAPWAVT

SEQ ID NO: 18276 - protein, 37 aa, Artificial sequence
  synthetic peptide
AGAASVSLHLLSPGSHSLFTRAILQSGSFNAPWAVTS

SEQ ID NO: 18277 - protein, 37 aa, Artificial sequence
  synthetic peptide
GAASVSLHLLSPGSHSLFTRAILQSGSFNAPWAVTSL

SEQ ID NO: 18278 - protein, 37 aa, Artificial sequence
  synthetic peptide
AASVSLHLLSPGSHSLFTRAILQSGSFNAPWAVTSLY

SEQ ID NO: 18279 - protein, 37 aa, Artificial sequence
  synthetic peptide
ASVSLHLLSPGSHSLFTRAILQSGSFNAPWAVTSLYE

SEQ ID NO: 18280 - protein, 37 aa, Artificial sequence
  synthetic peptide
SVSLHLLSPGSHSLFTRAILQSGSFNAPWAVTSLYEA

SEQ ID NO: 18281 - protein, 37 aa, Artificial sequence
  synthetic peptide
VSLHLLSPGSHSLFTRAILQSGSFNAPWAVTSLYEAR

SEQ ID NO: 18282 - protein, 37 aa, Artificial sequence
  synthetic peptide
SLHLLSPGSHSLFTRAILQSGSFNAPWAVTSLYEARN

SEQ ID NO: 18283 - protein, 37 aa, Artificial sequence
  synthetic peptide
LHLLSPGSHSLFTRAILQSGSFNAPWAVTSLYEARNR

SEQ ID NO: 18284 - protein, 37 aa, Artificial sequence
  synthetic peptide
HLLSPGSHSLFTRAILQSGSFNAPWAVTSLYEARNRT

SEQ ID NO: 18285 - protein, 37 aa, Artificial sequence
  synthetic peptide
LLSPGSHSLFTRAILQSGSFNAPWAVTSLYEARNRTL

SEQ ID NO: 18286 - protein, 37 aa, Artificial sequence
  synthetic peptide
LSPGSHSLFTRAILQSGSFNAPWAVTSLYEARNRTLN

SEQ ID NO: 18287 - protein, 37 aa, Artificial sequence
  synthetic peptide
SPGSHSLFTRAILQSGSFNAPWAVTSLYEARNRTLNL

SEQ ID NO: 18288 - protein, 37 aa, Artificial sequence
  synthetic peptide
PGSHSLFTRAILQSGSFNAPWAVTSLYEARNRTLNLA

SEQ ID NO: 18289 - protein, 37 aa, Artificial sequence
  synthetic peptide
GSHSLFTRAILQSGSFNAPWAVTSLYEARNRTLNLAK

SEQ ID NO: 18290 - protein, 37 aa, Artificial sequence
  synthetic peptide
SHSLFTRAILQSGSFNAPWAVTSLYEARNRTLNLAKL

SEQ ID NO: 18291 - protein, 37 aa, Artificial sequence
  synthetic peptide
HSLFTRAILQSGSFNAPWAVTSLYEARNRTLNLAKLT

SEQ ID NO: 18292 - protein, 37 aa, Artificial sequence
  synthetic peptide
SLFTRAILQSGSFNAPWAVTSLYEARNRTLNLAKLTG

SEQ ID NO: 18293 - protein, 37 aa, Artificial sequence
  synthetic peptide
LFTRAILQSGSFNAPWAVTSLYEARNRTLNLAKLTGC

SEQ ID NO: 18294 - protein, 37 aa, Artificial sequence
  synthetic peptide
FTRAILQSGSFNAPWAVTSLYEARNRTLNLAKLTGCS

SEQ ID NO: 18295 - protein, 37 aa, Artificial sequence
  synthetic peptide
TRAILQSGSFNAPWAVTSLYEARNRTLNLAKLTGCSR

SEQ ID NO: 18296 - protein, 37 aa, Artificial sequence
  synthetic peptide
RAILQSGSFNAPWAVTSLYEARNRTLNLAKLTGCSRE

SEQ ID NO: 18297 - protein, 37 aa, Artificial sequence
  synthetic peptide
AILQSGSFNAPWAVTSLYEARNRTLNLAKLTGCSREN

SEQ ID NO: 18298 - protein, 37 aa, Artificial sequence
  synthetic peptide
ILQSGSFNAPWAVTSLYEARNRTLNLAKLTGCSRENE

SEQ ID NO: 18299 - protein, 37 aa, Artificial sequence
  synthetic peptide
LQSGSFNAPWAVTSLYEARNRTLNLAKLTGCSRENET

SEQ ID NO: 18300 - protein, 37 aa, Artificial sequence
  synthetic peptide
QSGSFNAPWAVTSLYEARNRTLNLAKLTGCSRENETE

SEQ ID NO: 18301 - protein, 37 aa, Artificial sequence
  synthetic peptide
SGSFNAPWAVTSLYEARNRTLNLAKLTGCSRENETEI

SEQ ID NO: 18302 - protein, 37 aa, Artificial sequence
  synthetic peptide
GSFNAPWAVTSLYEARNRTLNLAKLTGCSRENETEII

SEQ ID NO: 18303 - protein, 37 aa, Artificial sequence
  synthetic peptide
SFNAPWAVTSLYEARNRTLNLAKLTGCSRENETEIIK

SEQ ID NO: 18304 - protein, 37 aa, Artificial sequence
  synthetic peptide
FNAPWAVTSLYEARNRTLNLAKLTGCSRENETEIIKC

SEQ ID NO: 18305 - protein, 37 aa, Artificial sequence
  synthetic peptide
NAPWAVTSLYEARNRTLNLAKLTGCSRENETEIIKCL

SEQ ID NO: 18306 - protein, 37 aa, Artificial sequence
  synthetic peptide
APWAVTSLYEARNRTLNLAKLTGCSRENETEIIKCLR

SEQ ID NO: 18307 - protein, 37 aa, Artificial sequence
  synthetic peptide
PWAVTSLYEARNRTLNLAKLTGCSRENETEIIKCLRN

SEQ ID NO: 18308 - protein, 37 aa, Artificial sequence
  synthetic peptide
WAVTSLYEARNRTLNLAKLTGCSRENETEIIKCLRNK

SEQ ID NO: 18309 - protein, 37 aa, Artificial sequence
  synthetic peptide
AVTSLYEARNRTLNLAKLTGCSRENETEIIKCLRNKD

SEQ ID NO: 18310 - protein, 37 aa, Artificial sequence
  synthetic peptide
VTSLYEARNRTLNLAKLTGCSRENETEIIKCLRNKDP

SEQ ID NO: 18311 - protein, 37 aa, Artificial sequence
  synthetic peptide
TSLYEARNRTLNLAKLTGCSRENETEIIKCLRNKDPQ

SEQ ID NO: 18312 - protein, 37 aa, Artificial sequence
  synthetic peptide
SLYEARNRTLNLAKLTGCSRENETEIIKCLRNKDPQE

SEQ ID NO: 18313 - protein, 37 aa, Artificial sequence
  synthetic peptide
LYEARNRTLNLAKLTGCSRENETEIIKCLRNKDPQEI

SEQ ID NO: 18314 - protein, 37 aa, Artificial sequence
  synthetic peptide
YEARNRTLNLAKLTGCSRENETEIIKCLRNKDPQEIL

SEQ ID NO: 18315 - protein, 37 aa, Artificial sequence
  synthetic peptide
EARNRTLNLAKLTGCSRENETEIIKCLRNKDPQEILL

SEQ ID NO: 18316 - protein, 37 aa, Artificial sequence
  synthetic peptide
ARNRTLNLAKLTGCSRENETEIIKCLRNKDPQEILLN

SEQ ID NO: 18317 - protein, 37 aa, Artificial sequence
  synthetic peptide
RNRTLNLAKLTGCSRENETEIIKCLRNKDPQEILLNE

SEQ ID NO: 18318 - protein, 37 aa, Artificial sequence
  synthetic peptide
NRTLNLAKLTGCSRENETEIIKCLRNKDPQEILLNEA

SEQ ID NO: 18319 - protein, 37 aa, Artificial sequence
  synthetic peptide
RTLNLAKLTGCSRENETEIIKCLRNKDPQEILLNEAF

SEQ ID NO: 18320 - protein, 37 aa, Artificial sequence
  synthetic peptide
TLNLAKLTGCSRENETEIIKCLRNKDPQEILLNEAFV

SEQ ID NO: 18321 - protein, 37 aa, Artificial sequence
  synthetic peptide
LNLAKLTGCSRENETEIIKCLRNKDPQEILLNEAFVV

SEQ ID NO: 18322 - protein, 37 aa, Artificial sequence
  synthetic peptide
NLAKLTGCSRENETEIIKCLRNKDPQEILLNEAFVVP

SEQ ID NO: 18323 - protein, 37 aa, Artificial sequence
  synthetic peptide
LAKLTGCSRENETEIIKCLRNKDPQEILLNEAFVVPY

SEQ ID NO: 18324 - protein, 37 aa, Artificial sequence
  synthetic peptide
AKLTGCSRENETEIIKCLRNKDPQEILLNEAFVVPYG

SEQ ID NO: 18325 - protein, 37 aa, Artificial sequence
  synthetic peptide
KLTGCSRENETEIIKCLRNKDPQEILLNEAFVVPYGT

SEQ ID NO: 18326 - protein, 37 aa, Artificial sequence
  synthetic peptide
LTGCSRENETEIIKCLRNKDPQEILLNEAFVVPYGTP

SEQ ID NO: 18327 - protein, 37 aa, Artificial sequence
  synthetic peptide
TGCSRENETEIIKCLRNKDPQEILLNEAFVVPYGTPL

SEQ ID NO: 18328 - protein, 37 aa, Artificial sequence
  synthetic peptide
GCSRENETEIIKCLRNKDPQEILLNEAFVVPYGTPLS

SEQ ID NO: 18329 - protein, 37 aa, Artificial sequence
  synthetic peptide
CSRENETEIIKCLRNKDPQEILLNEAFVVPYGTPLSV

SEQ ID NO: 18330 - protein, 37 aa, Artificial sequence
  synthetic peptide
SRENETEIIKCLRNKDPQEILLNEAFVVPYGTPLSVN

SEQ ID NO: 18331 - protein, 37 aa, Artificial sequence
  synthetic peptide
RENETEIIKCLRNKDPQEILLNEAFVVPYGTPLSVNF

SEQ ID NO: 18332 - protein, 37 aa, Artificial sequence
  synthetic peptide
ENETEIIKCLRNKDPQEILLNEAFVVPYGTPLSVNFG

SEQ ID NO: 18333 - protein, 37 aa, Artificial sequence
  synthetic peptide
NETEIIKCLRNKDPQEILLNEAFVVPYGTPLSVNFGP

SEQ ID NO: 18334 - protein, 37 aa, Artificial sequence
  synthetic peptide
ETEIIKCLRNKDPQEILLNEAFVVPYGTPLSVNFGPT

SEQ ID NO: 18335 - protein, 37 aa, Artificial sequence
  synthetic peptide
TEIIKCLRNKDPQEILLNEAFVVPYGTPLSVNFGPTV

SEQ ID NO: 18336 - protein, 37 aa, Artificial sequence
  synthetic peptide
EIIKCLRNKDPQEILLNEAFVVPYGTPLSVNFGPTVD

SEQ ID NO: 18337 - protein, 37 aa, Artificial sequence
  synthetic peptide
IIKCLRNKDPQEILLNEAFVVPYGTPLSVNFGPTVDG

SEQ ID NO: 18338 - protein, 37 aa, Artificial sequence
  synthetic peptide
IKCLRNKDPQEILLNEAFVVPYGTPLSVNFGPTVDGD

SEQ ID NO: 18339 - protein, 37 aa, Artificial sequence
  synthetic peptide
KCLRNKDPQEILLNEAFVVPYGTPLSVNFGPTVDGDF

SEQ ID NO: 18340 - protein, 37 aa, Artificial sequence
  synthetic peptide
CLRNKDPQEILLNEAFVVPYGTPLSVNFGPTVDGDFL

SEQ ID NO: 18341 - protein, 37 aa, Artificial sequence
  synthetic peptide
LRNKDPQEILLNEAFVVPYGTPLSVNFGPTVDGDFLT

SEQ ID NO: 18342 - protein, 37 aa, Artificial sequence
  synthetic peptide
RNKDPQEILLNEAFVVPYGTPLSVNFGPTVDGDFLTD

SEQ ID NO: 18343 - protein, 37 aa, Artificial sequence
  synthetic peptide
NKDPQEILLNEAFVVPYGTPLSVNFGPTVDGDFLTDM

SEQ ID NO: 18344 - protein, 37 aa, Artificial sequence
  synthetic peptide
KDPQEILLNEAFVVPYGTPLSVNFGPTVDGDFLTDMP

SEQ ID NO: 18345 - protein, 37 aa, Artificial sequence
  synthetic peptide
DPQEILLNEAFVVPYGTPLSVNFGPTVDGDFLTDMPD

SEQ ID NO: 18346 - protein, 37 aa, Artificial sequence
  synthetic peptide
PQEILLNEAFVVPYGTPLSVNFGPTVDGDFLTDMPDI

SEQ ID NO: 18347 - protein, 37 aa, Artificial sequence
  synthetic peptide
QEILLNEAFVVPYGTPLSVNFGPTVDGDFLTDMPDIL

SEQ ID NO: 18348 - protein, 37 aa, Artificial sequence
  synthetic peptide
EILLNEAFVVPYGTPLSVNFGPTVDGDFLTDMPDILL

SEQ ID NO: 18349 - protein, 37 aa, Artificial sequence
  synthetic peptide
ILLNEAFVVPYGTPLSVNFGPTVDGDFLTDMPDILLE

SEQ ID NO: 18350 - protein, 37 aa, Artificial sequence
  synthetic peptide
LLNEAFVVPYGTPLSVNFGPTVDGDFLTDMPDILLEL

SEQ ID NO: 18351 - protein, 37 aa, Artificial sequence
  synthetic peptide
LNEAFVVPYGTPLSVNFGPTVDGDFLTDMPDILLELG

SEQ ID NO: 18352 - protein, 37 aa, Artificial sequence
  synthetic peptide
NEAFVVPYGTPLSVNFGPTVDGDFLTDMPDILLELGQ

SEQ ID NO: 18353 - protein, 37 aa, Artificial sequence
  synthetic peptide
EAFVVPYGTPLSVNFGPTVDGDFLTDMPDILLELGQF

SEQ ID NO: 18354 - protein, 37 aa, Artificial sequence
  synthetic peptide
AFVVPYGTPLSVNFGPTVDGDFLTDMPDILLELGQFK

SEQ ID NO: 18355 - protein, 37 aa, Artificial sequence
  synthetic peptide
FVVPYGTPLSVNFGPTVDGDFLTDMPDILLELGQFKK

SEQ ID NO: 18356 - protein, 37 aa, Artificial sequence
  synthetic peptide
VVPYGTPLSVNFGPTVDGDFLTDMPDILLELGQFKKT

SEQ ID NO: 18357 - protein, 37 aa, Artificial sequence
  synthetic peptide
VPYGTPLSVNFGPTVDGDFLTDMPDILLELGQFKKTQ

SEQ ID NO: 18358 - protein, 37 aa, Artificial sequence
  synthetic peptide
PYGTPLSVNFGPTVDGDFLTDMPDILLELGQFKKTQI

SEQ ID NO: 18359 - protein, 37 aa, Artificial sequence
  synthetic peptide
YGTPLSVNFGPTVDGDFLTDMPDILLELGQFKKTQIL

SEQ ID NO: 18360 - protein, 37 aa, Artificial sequence
  synthetic peptide
GTPLSVNFGPTVDGDFLTDMPDILLELGQFKKTQILV

SEQ ID NO: 18361 - protein, 37 aa, Artificial sequence
  synthetic peptide
TPLSVNFGPTVDGDFLTDMPDILLELGQFKKTQILVG

SEQ ID NO: 18362 - protein, 37 aa, Artificial sequence
  synthetic peptide
PLSVNFGPTVDGDFLTDMPDILLELGQFKKTQILVGV

SEQ ID NO: 18363 - protein, 37 aa, Artificial sequence
  synthetic peptide
LSVNFGPTVDGDFLTDMPDILLELGQFKKTQILVGVN

SEQ ID NO: 18364 - protein, 37 aa, Artificial sequence
  synthetic peptide
SVNFGPTVDGDFLTDMPDILLELGQFKKTQILVGVNK

SEQ ID NO: 18365 - protein, 37 aa, Artificial sequence
  synthetic peptide
VNFGPTVDGDFLTDMPDILLELGQFKKTQILVGVNKD

SEQ ID NO: 18366 - protein, 37 aa, Artificial sequence
  synthetic peptide
NFGPTVDGDFLTDMPDILLELGQFKKTQILVGVNKDE

SEQ ID NO: 18367 - protein, 37 aa, Artificial sequence
  synthetic peptide
FGPTVDGDFLTDMPDILLELGQFKKTQILVGVNKDEG

SEQ ID NO: 18368 - protein, 37 aa, Artificial sequence
  synthetic peptide
GPTVDGDFLTDMPDILLELGQFKKTQILVGVNKDEGT

SEQ ID NO: 18369 - protein, 37 aa, Artificial sequence
  synthetic peptide
PTVDGDFLTDMPDILLELGQFKKTQILVGVNKDEGTA

SEQ ID NO: 18370 - protein, 37 aa, Artificial sequence
  synthetic peptide
TVDGDFLTDMPDILLELGQFKKTQILVGVNKDEGTAF

SEQ ID NO: 18371 - protein, 37 aa, Artificial sequence
  synthetic peptide
VDGDFLTDMPDILLELGQFKKTQILVGVNKDEGTAFL

SEQ ID NO: 18372 - protein, 37 aa, Artificial sequence
  synthetic peptide
DGDFLTDMPDILLELGQFKKTQILVGVNKDEGTAFLV

SEQ ID NO: 18373 - protein, 37 aa, Artificial sequence
  synthetic peptide
GDFLTDMPDILLELGQFKKTQILVGVNKDEGTAFLVY

SEQ ID NO: 18374 - protein, 37 aa, Artificial sequence
  synthetic peptide
DFLTDMPDILLELGQFKKTQILVGVNKDEGTAFLVYG

SEQ ID NO: 18375 - protein, 37 aa, Artificial sequence
  synthetic peptide
FLTDMPDILLELGQFKKTQILVGVNKDEGTAFLVYGA

SEQ ID NO: 18376 - protein, 37 aa, Artificial sequence
  synthetic peptide
LTDMPDILLELGQFKKTQILVGVNKDEGTAFLVYGAP

SEQ ID NO: 18377 - protein, 37 aa, Artificial sequence
  synthetic peptide
TDMPDILLELGQFKKTQILVGVNKDEGTAFLVYGAPG

SEQ ID NO: 18378 - protein, 37 aa, Artificial sequence
  synthetic peptide
DMPDILLELGQFKKTQILVGVNKDEGTAFLVYGAPGF

SEQ ID NO: 18379 - protein, 37 aa, Artificial sequence
  synthetic peptide
MPDILLELGQFKKTQILVGVNKDEGTAFLVYGAPGFS

SEQ ID NO: 18380 - protein, 37 aa, Artificial sequence
  synthetic peptide
PDILLELGQFKKTQILVGVNKDEGTAFLVYGAPGFSK

SEQ ID NO: 18381 - protein, 37 aa, Artificial sequence
  synthetic peptide
DILLELGQFKKTQILVGVNKDEGTAFLVYGAPGFSKD

SEQ ID NO: 18382 - protein, 37 aa, Artificial sequence
  synthetic peptide
ILLELGQFKKTQILVGVNKDEGTAFLVYGAPGFSKDN

SEQ ID NO: 18383 - protein, 37 aa, Artificial sequence
  synthetic peptide
LLELGQFKKTQILVGVNKDEGTAFLVYGAPGFSKDNN

SEQ ID NO: 18384 - protein, 37 aa, Artificial sequence
  synthetic peptide
LELGQFKKTQILVGVNKDEGTAFLVYGAPGFSKDNNS

SEQ ID NO: 18385 - protein, 37 aa, Artificial sequence
  synthetic peptide
ELGQFKKTQILVGVNKDEGTAFLVYGAPGFSKDNNSI

SEQ ID NO: 18386 - protein, 37 aa, Artificial sequence
  synthetic peptide
LGQFKKTQILVGVNKDEGTAFLVYGAPGFSKDNNSII

SEQ ID NO: 18387 - protein, 37 aa, Artificial sequence
  synthetic peptide
GQFKKTQILVGVNKDEGTAFLVYGAPGFSKDNNSIIT

SEQ ID NO: 18388 - protein, 37 aa, Artificial sequence
  synthetic peptide
QFKKTQILVGVNKDEGTAFLVYGAPGFSKDNNSIITR

SEQ ID NO: 18389 - protein, 37 aa, Artificial sequence
  synthetic peptide
FKKTQILVGVNKDEGTAFLVYGAPGFSKDNNSIITRK

SEQ ID NO: 18390 - protein, 37 aa, Artificial sequence
  synthetic peptide
KKTQILVGVNKDEGTAFLVYGAPGFSKDNNSIITRKE

SEQ ID NO: 18391 - protein, 37 aa, Artificial sequence
  synthetic peptide
KTQILVGVNKDEGTAFLVYGAPGFSKDNNSIITRKEF

SEQ ID NO: 18392 - protein, 37 aa, Artificial sequence
  synthetic peptide
TQILVGVNKDEGTAFLVYGAPGFSKDNNSIITRKEFQ

SEQ ID NO: 18393 - protein, 37 aa, Artificial sequence
  synthetic peptide
QILVGVNKDEGTAFLVYGAPGFSKDNNSIITRKEFQE

SEQ ID NO: 18394 - protein, 37 aa, Artificial sequence
  synthetic peptide
ILVGVNKDEGTAFLVYGAPGFSKDNNSIITRKEFQEG

SEQ ID NO: 18395 - protein, 37 aa, Artificial sequence
  synthetic peptide
LVGVNKDEGTAFLVYGAPGFSKDNNSIITRKEFQEGL

SEQ ID NO: 18396 - protein, 37 aa, Artificial sequence
  synthetic peptide
VGVNKDEGTAFLVYGAPGFSKDNNSIITRKEFQEGLK

SEQ ID NO: 18397 - protein, 37 aa, Artificial sequence
  synthetic peptide
GVNKDEGTAFLVYGAPGFSKDNNSIITRKEFQEGLKI

SEQ ID NO: 18398 - protein, 37 aa, Artificial sequence
  synthetic peptide
VNKDEGTAFLVYGAPGFSKDNNSIITRKEFQEGLKIF

SEQ ID NO: 18399 - protein, 37 aa, Artificial sequence
  synthetic peptide
NKDEGTAFLVYGAPGFSKDNNSIITRKEFQEGLKIFF

SEQ ID NO: 18400 - protein, 37 aa, Artificial sequence
  synthetic peptide
KDEGTAFLVYGAPGFSKDNNSIITRKEFQEGLKIFFP

SEQ ID NO: 18401 - protein, 37 aa, Artificial sequence
  synthetic peptide
DEGTAFLVYGAPGFSKDNNSIITRKEFQEGLKIFFPG

SEQ ID NO: 18402 - protein, 37 aa, Artificial sequence
  synthetic peptide
EGTAFLVYGAPGFSKDNNSIITRKEFQEGLKIFFPGV

SEQ ID NO: 18403 - protein, 37 aa, Artificial sequence
  synthetic peptide
GTAFLVYGAPGFSKDNNSIITRKEFQEGLKIFFPGVS

SEQ ID NO: 18404 - protein, 37 aa, Artificial sequence
  synthetic peptide
TAFLVYGAPGFSKDNNSIITRKEFQEGLKIFFPGVSE

SEQ ID NO: 18405 - protein, 37 aa, Artificial sequence
  synthetic peptide
AFLVYGAPGFSKDNNSIITRKEFQEGLKIFFPGVSEF

SEQ ID NO: 18406 - protein, 37 aa, Artificial sequence
  synthetic peptide
FLVYGAPGFSKDNNSIITRKEFQEGLKIFFPGVSEFG

SEQ ID NO: 18407 - protein, 37 aa, Artificial sequence
  synthetic peptide
LVYGAPGFSKDNNSIITRKEFQEGLKIFFPGVSEFGK

SEQ ID NO: 18408 - protein, 37 aa, Artificial sequence
  synthetic peptide
VYGAPGFSKDNNSIITRKEFQEGLKIFFPGVSEFGKE

SEQ ID NO: 18409 - protein, 37 aa, Artificial sequence
  synthetic peptide
YGAPGFSKDNNSIITRKEFQEGLKIFFPGVSEFGKES

SEQ ID NO: 18410 - protein, 37 aa, Artificial sequence
  synthetic peptide
GAPGFSKDNNSIITRKEFQEGLKIFFPGVSEFGKESI

SEQ ID NO: 18411 - protein, 37 aa, Artificial sequence
  synthetic peptide
APGFSKDNNSIITRKEFQEGLKIFFPGVSEFGKESIL

SEQ ID NO: 18412 - protein, 37 aa, Artificial sequence
  synthetic peptide
PGFSKDNNSIITRKEFQEGLKIFFPGVSEFGKESILF

SEQ ID NO: 18413 - protein, 37 aa, Artificial sequence
  synthetic peptide
GFSKDNNSIITRKEFQEGLKIFFPGVSEFGKESILFH

SEQ ID NO: 18414 - protein, 37 aa, Artificial sequence
  synthetic peptide
FSKDNNSIITRKEFQEGLKIFFPGVSEFGKESILFHY

SEQ ID NO: 18415 - protein, 37 aa, Artificial sequence
  synthetic peptide
SKDNNSIITRKEFQEGLKIFFPGVSEFGKESILFHYT

SEQ ID NO: 18416 - protein, 37 aa, Artificial sequence
  synthetic peptide
KDNNSIITRKEFQEGLKIFFPGVSEFGKESILFHYTD

SEQ ID NO: 18417 - protein, 37 aa, Artificial sequence
  synthetic peptide
DNNSIITRKEFQEGLKIFFPGVSEFGKESILFHYTDW

SEQ ID NO: 18418 - protein, 37 aa, Artificial sequence
  synthetic peptide
NNSIITRKEFQEGLKIFFPGVSEFGKESILFHYTDWV

SEQ ID NO: 18419 - protein, 37 aa, Artificial sequence
  synthetic peptide
NSIITRKEFQEGLKIFFPGVSEFGKESILFHYTDWVD

SEQ ID NO: 18420 - protein, 37 aa, Artificial sequence
  synthetic peptide
SIITRKEFQEGLKIFFPGVSEFGKESILFHYTDWVDD

SEQ ID NO: 18421 - protein, 37 aa, Artificial sequence
  synthetic peptide
IITRKEFQEGLKIFFPGVSEFGKESILFHYTDWVDDQ

SEQ ID NO: 18422 - protein, 37 aa, Artificial sequence
  synthetic peptide
ITRKEFQEGLKIFFPGVSEFGKESILFHYTDWVDDQR

SEQ ID NO: 18423 - protein, 37 aa, Artificial sequence
  synthetic peptide
TRKEFQEGLKIFFPGVSEFGKESILFHYTDWVDDQRP

SEQ ID NO: 18424 - protein, 37 aa, Artificial sequence
  synthetic peptide
RKEFQEGLKIFFPGVSEFGKESILFHYTDWVDDQRPE

SEQ ID NO: 18425 - protein, 37 aa, Artificial sequence
  synthetic peptide
KEFQEGLKIFFPGVSEFGKESILFHYTDWVDDQRPEN

SEQ ID NO: 18426 - protein, 37 aa, Artificial sequence
  synthetic peptide
EFQEGLKIFFPGVSEFGKESILFHYTDWVDDQRPENY

SEQ ID NO: 18427 - protein, 37 aa, Artificial sequence
  synthetic peptide
FQEGLKIFFPGVSEFGKESILFHYTDWVDDQRPENYR

SEQ ID NO: 18428 - protein, 37 aa, Artificial sequence
  synthetic peptide
QEGLKIFFPGVSEFGKESILFHYTDWVDDQRPENYRE

SEQ ID NO: 18429 - protein, 37 aa, Artificial sequence
  synthetic peptide
EGLKIFFPGVSEFGKESILFHYTDWVDDQRPENYREA

SEQ ID NO: 18430 - protein, 37 aa, Artificial sequence
  synthetic peptide
GLKIFFPGVSEFGKESILFHYTDWVDDQRPENYREAL

SEQ ID NO: 18431 - protein, 37 aa, Artificial sequence
  synthetic peptide
LKIFFPGVSEFGKESILFHYTDWVDDQRPENYREALG

SEQ ID NO: 18432 - protein, 37 aa, Artificial sequence
  synthetic peptide
KIFFPGVSEFGKESILFHYTDWVDDQRPENYREALGD

SEQ ID NO: 18433 - protein, 37 aa, Artificial sequence
  synthetic peptide
IFFPGVSEFGKESILFHYTDWVDDQRPENYREALGDV

SEQ ID NO: 18434 - protein, 37 aa, Artificial sequence
  synthetic peptide
FFPGVSEFGKESILFHYTDWVDDQRPENYREALGDVV

SEQ ID NO: 18435 - protein, 37 aa, Artificial sequence
  synthetic peptide
FPGVSEFGKESILFHYTDWVDDQRPENYREALGDVVG

SEQ ID NO: 18436 - protein, 37 aa, Artificial sequence
  synthetic peptide
PGVSEFGKESILFHYTDWVDDQRPENYREALGDVVGD

SEQ ID NO: 18437 - protein, 37 aa, Artificial sequence
  synthetic peptide
GVSEFGKESILFHYTDWVDDQRPENYREALGDVVGDY

SEQ ID NO: 18438 - protein, 37 aa, Artificial sequence
  synthetic peptide
VSEFGKESILFHYTDWVDDQRPENYREALGDVVGDYN

SEQ ID NO: 18439 - protein, 37 aa, Artificial sequence
  synthetic peptide
SEFGKESILFHYTDWVDDQRPENYREALGDVVGDYNF

SEQ ID NO: 18440 - protein, 37 aa, Artificial sequence
  synthetic peptide
EFGKESILFHYTDWVDDQRPENYREALGDVVGDYNFI

SEQ ID NO: 18441 - protein, 37 aa, Artificial sequence
  synthetic peptide
FGKESILFHYTDWVDDQRPENYREALGDVVGDYNFIC

SEQ ID NO: 18442 - protein, 37 aa, Artificial sequence
  synthetic peptide
GKESILFHYTDWVDDQRPENYREALGDVVGDYNFICP

SEQ ID NO: 18443 - protein, 37 aa, Artificial sequence
  synthetic peptide
KESILFHYTDWVDDQRPENYREALGDVVGDYNFICPA

SEQ ID NO: 18444 - protein, 37 aa, Artificial sequence
  synthetic peptide
ESILFHYTDWVDDQRPENYREALGDVVGDYNFICPAL

SEQ ID NO: 18445 - protein, 37 aa, Artificial sequence
  synthetic peptide
SILFHYTDWVDDQRPENYREALGDVVGDYNFICPALE

SEQ ID NO: 18446 - protein, 37 aa, Artificial sequence
  synthetic peptide
ILFHYTDWVDDQRPENYREALGDVVGDYNFICPALEF

SEQ ID NO: 18447 - protein, 37 aa, Artificial sequence
  synthetic peptide
LFHYTDWVDDQRPENYREALGDVVGDYNFICPALEFT

SEQ ID NO: 18448 - protein, 37 aa, Artificial sequence
  synthetic peptide
FHYTDWVDDQRPENYREALGDVVGDYNFICPALEFTK

SEQ ID NO: 18449 - protein, 37 aa, Artificial sequence
  synthetic peptide
HYTDWVDDQRPENYREALGDVVGDYNFICPALEFTKK

SEQ ID NO: 18450 - protein, 37 aa, Artificial sequence
  synthetic peptide
YTDWVDDQRPENYREALGDVVGDYNFICPALEFTKKF

SEQ ID NO: 18451 - protein, 37 aa, Artificial sequence
  synthetic peptide
TDWVDDQRPENYREALGDVVGDYNFICPALEFTKKFS

SEQ ID NO: 18452 - protein, 37 aa, Artificial sequence
  synthetic peptide
DWVDDQRPENYREALGDVVGDYNFICPALEFTKKFSE

SEQ ID NO: 18453 - protein, 37 aa, Artificial sequence
  synthetic peptide
WVDDQRPENYREALGDVVGDYNFICPALEFTKKFSEW

SEQ ID NO: 18454 - protein, 37 aa, Artificial sequence
  synthetic peptide
VDDQRPENYREALGDVVGDYNFICPALEFTKKFSEWG

SEQ ID NO: 18455 - protein, 37 aa, Artificial sequence
  synthetic peptide
DDQRPENYREALGDVVGDYNFICPALEFTKKFSEWGN

SEQ ID NO: 18456 - protein, 37 aa, Artificial sequence
  synthetic peptide
DQRPENYREALGDVVGDYNFICPALEFTKKFSEWGNN

SEQ ID NO: 18457 - protein, 37 aa, Artificial sequence
  synthetic peptide
QRPENYREALGDVVGDYNFICPALEFTKKFSEWGNNA

SEQ ID NO: 18458 - protein, 37 aa, Artificial sequence
  synthetic peptide
RPENYREALGDVVGDYNFICPALEFTKKFSEWGNNAF

SEQ ID NO: 18459 - protein, 37 aa, Artificial sequence
  synthetic peptide
PENYREALGDVVGDYNFICPALEFTKKFSEWGNNAFF

SEQ ID NO: 18460 - protein, 37 aa, Artificial sequence
  synthetic peptide
ENYREALGDVVGDYNFICPALEFTKKFSEWGNNAFFY

SEQ ID NO: 18461 - protein, 37 aa, Artificial sequence
  synthetic peptide
NYREALGDVVGDYNFICPALEFTKKFSEWGNNAFFYY

SEQ ID NO: 18462 - protein, 37 aa, Artificial sequence
  synthetic peptide
YREALGDVVGDYNFICPALEFTKKFSEWGNNAFFYYF

SEQ ID NO: 18463 - protein, 37 aa, Artificial sequence
  synthetic peptide
REALGDVVGDYNFICPALEFTKKFSEWGNNAFFYYFE

SEQ ID NO: 18464 - protein, 37 aa, Artificial sequence
  synthetic peptide
EALGDVVGDYNFICPALEFTKKFSEWGNNAFFYYFEH

SEQ ID NO: 18465 - protein, 37 aa, Artificial sequence
  synthetic peptide
ALGDVVGDYNFICPALEFTKKFSEWGNNAFFYYFEHR

SEQ ID NO: 18466 - protein, 37 aa, Artificial sequence
  synthetic peptide
LGDVVGDYNFICPALEFTKKFSEWGNNAFFYYFEHRS

SEQ ID NO: 18467 - protein, 37 aa, Artificial sequence
  synthetic peptide
GDVVGDYNFICPALEFTKKFSEWGNNAFFYYFEHRSS

SEQ ID NO: 18468 - protein, 37 aa, Artificial sequence
  synthetic peptide
DVVGDYNFICPALEFTKKFSEWGNNAFFYYFEHRSSK

SEQ ID NO: 18469 - protein, 37 aa, Artificial sequence
  synthetic peptide
VVGDYNFICPALEFTKKFSEWGNNAFFYYFEHRSSKL

SEQ ID NO: 18470 - protein, 37 aa, Artificial sequence
  synthetic peptide
VGDYNFICPALEFTKKFSEWGNNAFFYYFEHRSSKLP

SEQ ID NO: 18471 - protein, 37 aa, Artificial sequence
  synthetic peptide
GDYNFICPALEFTKKFSEWGNNAFFYYFEHRSSKLPW

SEQ ID NO: 18472 - protein, 37 aa, Artificial sequence
  synthetic peptide
DYNFICPALEFTKKFSEWGNNAFFYYFEHRSSKLPWP

SEQ ID NO: 18473 - protein, 37 aa, Artificial sequence
  synthetic peptide
YNFICPALEFTKKFSEWGNNAFFYYFEHRSSKLPWPE

SEQ ID NO: 18474 - protein, 37 aa, Artificial sequence
  synthetic peptide
NFICPALEFTKKFSEWGNNAFFYYFEHRSSKLPWPEW

SEQ ID NO: 18475 - protein, 37 aa, Artificial sequence
  synthetic peptide
FICPALEFTKKFSEWGNNAFFYYFEHRSSKLPWPEWM

SEQ ID NO: 18476 - protein, 37 aa, Artificial sequence
  synthetic peptide
ICPALEFTKKFSEWGNNAFFYYFEHRSSKLPWPEWMG

SEQ ID NO: 18477 - protein, 37 aa, Artificial sequence
  synthetic peptide
CPALEFTKKFSEWGNNAFFYYFEHRSSKLPWPEWMGV

SEQ ID NO: 18478 - protein, 37 aa, Artificial sequence
  synthetic peptide
PALEFTKKFSEWGNNAFFYYFEHRSSKLPWPEWMGVM

SEQ ID NO: 18479 - protein, 37 aa, Artificial sequence
  synthetic peptide
ALEFTKKFSEWGNNAFFYYFEHRSSKLPWPEWMGVMH

SEQ ID NO: 18480 - protein, 37 aa, Artificial sequence
  synthetic peptide
LEFTKKFSEWGNNAFFYYFEHRSSKLPWPEWMGVMHG

SEQ ID NO: 18481 - protein, 37 aa, Artificial sequence
  synthetic peptide
EFTKKFSEWGNNAFFYYFEHRSSKLPWPEWMGVMHGY

SEQ ID NO: 18482 - protein, 37 aa, Artificial sequence
  synthetic peptide
FTKKFSEWGNNAFFYYFEHRSSKLPWPEWMGVMHGYE

SEQ ID NO: 18483 - protein, 37 aa, Artificial sequence
  synthetic peptide
TKKFSEWGNNAFFYYFEHRSSKLPWPEWMGVMHGYEI

SEQ ID NO: 18484 - protein, 37 aa, Artificial sequence
  synthetic peptide
KKFSEWGNNAFFYYFEHRSSKLPWPEWMGVMHGYEIE

SEQ ID NO: 18485 - protein, 37 aa, Artificial sequence
  synthetic peptide
KFSEWGNNAFFYYFEHRSSKLPWPEWMGVMHGYEIEF

SEQ ID NO: 18486 - protein, 37 aa, Artificial sequence
  synthetic peptide
FSEWGNNAFFYYFEHRSSKLPWPEWMGVMHGYEIEFV

SEQ ID NO: 18487 - protein, 37 aa, Artificial sequence
  synthetic peptide
SEWGNNAFFYYFEHRSSKLPWPEWMGVMHGYEIEFVF

SEQ ID NO: 18488 - protein, 37 aa, Artificial sequence
  synthetic peptide
EWGNNAFFYYFEHRSSKLPWPEWMGVMHGYEIEFVFG

SEQ ID NO: 18489 - protein, 37 aa, Artificial sequence
  synthetic peptide
WGNNAFFYYFEHRSSKLPWPEWMGVMHGYEIEFVFGL

SEQ ID NO: 18490 - protein, 37 aa, Artificial sequence
  synthetic peptide
GNNAFFYYFEHRSSKLPWPEWMGVMHGYEIEFVFGLP

SEQ ID NO: 18491 - protein, 37 aa, Artificial sequence
  synthetic peptide
NNAFFYYFEHRSSKLPWPEWMGVMHGYEIEFVFGLPL

SEQ ID NO: 18492 - protein, 37 aa, Artificial sequence
  synthetic peptide
NAFFYYFEHRSSKLPWPEWMGVMHGYEIEFVFGLPLE

SEQ ID NO: 18493 - protein, 37 aa, Artificial sequence
  synthetic peptide
AFFYYFEHRSSKLPWPEWMGVMHGYEIEFVFGLPLER

SEQ ID NO: 18494 - protein, 37 aa, Artificial sequence
  synthetic peptide
FFYYFEHRSSKLPWPEWMGVMHGYEIEFVFGLPLERR

SEQ ID NO: 18495 - protein, 37 aa, Artificial sequence
  synthetic peptide
FYYFEHRSSKLPWPEWMGVMHGYEIEFVFGLPLERRD

SEQ ID NO: 18496 - protein, 37 aa, Artificial sequence
  synthetic peptide
YYFEHRSSKLPWPEWMGVMHGYEIEFVFGLPLERRDN

SEQ ID NO: 18497 - protein, 37 aa, Artificial sequence
  synthetic peptide
YFEHRSSKLPWPEWMGVMHGYEIEFVFGLPLERRDNY

SEQ ID NO: 18498 - protein, 37 aa, Artificial sequence
  synthetic peptide
FEHRSSKLPWPEWMGVMHGYEIEFVFGLPLERRDNYT

SEQ ID NO: 18499 - protein, 37 aa, Artificial sequence
  synthetic peptide
EHRSSKLPWPEWMGVMHGYEIEFVFGLPLERRDNYTK

SEQ ID NO: 18500 - protein, 37 aa, Artificial sequence
  synthetic peptide
HRSSKLPWPEWMGVMHGYEIEFVFGLPLERRDNYTKA

SEQ ID NO: 18501 - protein, 37 aa, Artificial sequence
  synthetic peptide
RSSKLPWPEWMGVMHGYEIEFVFGLPLERRDNYTKAE

SEQ ID NO: 18502 - protein, 37 aa, Artificial sequence
  synthetic peptide
SSKLPWPEWMGVMHGYEIEFVFGLPLERRDNYTKAEE

SEQ ID NO: 18503 - protein, 37 aa, Artificial sequence
  synthetic peptide
SKLPWPEWMGVMHGYEIEFVFGLPLERRDNYTKAEEI

SEQ ID NO: 18504 - protein, 37 aa, Artificial sequence
  synthetic peptide
KLPWPEWMGVMHGYEIEFVFGLPLERRDNYTKAEEIL

SEQ ID NO: 18505 - protein, 37 aa, Artificial sequence
  synthetic peptide
LPWPEWMGVMHGYEIEFVFGLPLERRDNYTKAEEILS

SEQ ID NO: 18506 - protein, 37 aa, Artificial sequence
  synthetic peptide
PWPEWMGVMHGYEIEFVFGLPLERRDNYTKAEEILSR

SEQ ID NO: 18507 - protein, 37 aa, Artificial sequence
  synthetic peptide
WPEWMGVMHGYEIEFVFGLPLERRDNYTKAEEILSRS

SEQ ID NO: 18508 - protein, 37 aa, Artificial sequence
  synthetic peptide
PEWMGVMHGYEIEFVFGLPLERRDNYTKAEEILSRSI

SEQ ID NO: 18509 - protein, 37 aa, Artificial sequence
  synthetic peptide
EWMGVMHGYEIEFVFGLPLERRDNYTKAEEILSRSIV

SEQ ID NO: 18510 - protein, 37 aa, Artificial sequence
  synthetic peptide
WMGVMHGYEIEFVFGLPLERRDNYTKAEEILSRSIVK

SEQ ID NO: 18511 - protein, 37 aa, Artificial sequence
  synthetic peptide
MGVMHGYEIEFVFGLPLERRDNYTKAEEILSRSIVKR

SEQ ID NO: 18512 - protein, 37 aa, Artificial sequence
  synthetic peptide
GVMHGYEIEFVFGLPLERRDNYTKAEEILSRSIVKRW

SEQ ID NO: 18513 - protein, 37 aa, Artificial sequence
  synthetic peptide
VMHGYEIEFVFGLPLERRDNYTKAEEILSRSIVKRWA

SEQ ID NO: 18514 - protein, 37 aa, Artificial sequence
  synthetic peptide
MHGYEIEFVFGLPLERRDNYTKAEEILSRSIVKRWAN

SEQ ID NO: 18515 - protein, 37 aa, Artificial sequence
  synthetic peptide
HGYEIEFVFGLPLERRDNYTKAEEILSRSIVKRWANF

SEQ ID NO: 18516 - protein, 37 aa, Artificial sequence
  synthetic peptide
GYEIEFVFGLPLERRDNYTKAEEILSRSIVKRWANFA

SEQ ID NO: 18517 - protein, 37 aa, Artificial sequence
  synthetic peptide
YEIEFVFGLPLERRDNYTKAEEILSRSIVKRWANFAK

SEQ ID NO: 18518 - protein, 37 aa, Artificial sequence
  synthetic peptide
EIEFVFGLPLERRDNYTKAEEILSRSIVKRWANFAKY

SEQ ID NO: 18519 - protein, 37 aa, Artificial sequence
  synthetic peptide
IEFVFGLPLERRDNYTKAEEILSRSIVKRWANFAKYG

SEQ ID NO: 18520 - protein, 37 aa, Artificial sequence
  synthetic peptide
EFVFGLPLERRDNYTKAEEILSRSIVKRWANFAKYGN

SEQ ID NO: 18521 - protein, 37 aa, Artificial sequence
  synthetic peptide
FVFGLPLERRDNYTKAEEILSRSIVKRWANFAKYGNP

SEQ ID NO: 18522 - protein, 37 aa, Artificial sequence
  synthetic peptide
VFGLPLERRDNYTKAEEILSRSIVKRWANFAKYGNPN

SEQ ID NO: 18523 - protein, 37 aa, Artificial sequence
  synthetic peptide
FGLPLERRDNYTKAEEILSRSIVKRWANFAKYGNPNE

SEQ ID NO: 18524 - protein, 37 aa, Artificial sequence
  synthetic peptide
GLPLERRDNYTKAEEILSRSIVKRWANFAKYGNPNET

SEQ ID NO: 18525 - protein, 37 aa, Artificial sequence
  synthetic peptide
LPLERRDNYTKAEEILSRSIVKRWANFAKYGNPNETQ

SEQ ID NO: 18526 - protein, 37 aa, Artificial sequence
  synthetic peptide
PLERRDNYTKAEEILSRSIVKRWANFAKYGNPNETQN

SEQ ID NO: 18527 - protein, 37 aa, Artificial sequence
  synthetic peptide
LERRDNYTKAEEILSRSIVKRWANFAKYGNPNETQNN

SEQ ID NO: 18528 - protein, 37 aa, Artificial sequence
  synthetic peptide
ERRDNYTKAEEILSRSIVKRWANFAKYGNPNETQNNS

SEQ ID NO: 18529 - protein, 37 aa, Artificial sequence
  synthetic peptide
RRDNYTKAEEILSRSIVKRWANFAKYGNPNETQNNST

SEQ ID NO: 18530 - protein, 37 aa, Artificial sequence
  synthetic peptide
RDNYTKAEEILSRSIVKRWANFAKYGNPNETQNNSTS

SEQ ID NO: 18531 - protein, 37 aa, Artificial sequence
  synthetic peptide
DNYTKAEEILSRSIVKRWANFAKYGNPNETQNNSTSW

SEQ ID NO: 18532 - protein, 37 aa, Artificial sequence
  synthetic peptide
NYTKAEEILSRSIVKRWANFAKYGNPNETQNNSTSWP

SEQ ID NO: 18533 - protein, 37 aa, Artificial sequence
  synthetic peptide
YTKAEEILSRSIVKRWANFAKYGNPNETQNNSTSWPV

SEQ ID NO: 18534 - protein, 37 aa, Artificial sequence
  synthetic peptide
TKAEEILSRSIVKRWANFAKYGNPNETQNNSTSWPVF

SEQ ID NO: 18535 - protein, 37 aa, Artificial sequence
  synthetic peptide
KAEEILSRSIVKRWANFAKYGNPNETQNNSTSWPVFK

SEQ ID NO: 18536 - protein, 37 aa, Artificial sequence
  synthetic peptide
AEEILSRSIVKRWANFAKYGNPNETQNNSTSWPVFKS

SEQ ID NO: 18537 - protein, 37 aa, Artificial sequence
  synthetic peptide
EEILSRSIVKRWANFAKYGNPNETQNNSTSWPVFKST

SEQ ID NO: 18538 - protein, 37 aa, Artificial sequence
  synthetic peptide
EILSRSIVKRWANFAKYGNPNETQNNSTSWPVFKSTE

SEQ ID NO: 18539 - protein, 37 aa, Artificial sequence
  synthetic peptide
ILSRSIVKRWANFAKYGNPNETQNNSTSWPVFKSTEQ

SEQ ID NO: 18540 - protein, 37 aa, Artificial sequence
  synthetic peptide
LSRSIVKRWANFAKYGNPNETQNNSTSWPVFKSTEQK

SEQ ID NO: 18541 - protein, 37 aa, Artificial sequence
  synthetic peptide
SRSIVKRWANFAKYGNPNETQNNSTSWPVFKSTEQKY

SEQ ID NO: 18542 - protein, 37 aa, Artificial sequence
  synthetic peptide
RSIVKRWANFAKYGNPNETQNNSTSWPVFKSTEQKYL

SEQ ID NO: 18543 - protein, 37 aa, Artificial sequence
  synthetic peptide
SIVKRWANFAKYGNPNETQNNSTSWPVFKSTEQKYLT

SEQ ID NO: 18544 - protein, 37 aa, Artificial sequence
  synthetic peptide
IVKRWANFAKYGNPNETQNNSTSWPVFKSTEQKYLTL

SEQ ID NO: 18545 - protein, 37 aa, Artificial sequence
  synthetic peptide
VKRWANFAKYGNPNETQNNSTSWPVFKSTEQKYLTLN

SEQ ID NO: 18546 - protein, 37 aa, Artificial sequence
  synthetic peptide
KRWANFAKYGNPNETQNNSTSWPVFKSTEQKYLTLNT

SEQ ID NO: 18547 - protein, 37 aa, Artificial sequence
  synthetic peptide
RWANFAKYGNPNETQNNSTSWPVFKSTEQKYLTLNTE

SEQ ID NO: 18548 - protein, 37 aa, Artificial sequence
  synthetic peptide
WANFAKYGNPNETQNNSTSWPVFKSTEQKYLTLNTES

SEQ ID NO: 18549 - protein, 37 aa, Artificial sequence
  synthetic peptide
ANFAKYGNPNETQNNSTSWPVFKSTEQKYLTLNTEST

SEQ ID NO: 18550 - protein, 37 aa, Artificial sequence
  synthetic peptide
NFAKYGNPNETQNNSTSWPVFKSTEQKYLTLNTESTR

SEQ ID NO: 18551 - protein, 37 aa, Artificial sequence
  synthetic peptide
FAKYGNPNETQNNSTSWPVFKSTEQKYLTLNTESTRI

SEQ ID NO: 18552 - protein, 37 aa, Artificial sequence
  synthetic peptide
AKYGNPNETQNNSTSWPVFKSTEQKYLTLNTESTRIM

SEQ ID NO: 18553 - protein, 37 aa, Artificial sequence
  synthetic peptide
KYGNPNETQNNSTSWPVFKSTEQKYLTLNTESTRIMT

SEQ ID NO: 18554 - protein, 37 aa, Artificial sequence
  synthetic peptide
YGNPNETQNNSTSWPVFKSTEQKYLTLNTESTRIMTK

SEQ ID NO: 18555 - protein, 37 aa, Artificial sequence
  synthetic peptide
GNPNETQNNSTSWPVFKSTEQKYLTLNTESTRIMTKL

SEQ ID NO: 18556 - protein, 37 aa, Artificial sequence
  synthetic peptide
NPNETQNNSTSWPVFKSTEQKYLTLNTESTRIMTKLR

SEQ ID NO: 18557 - protein, 37 aa, Artificial sequence
  synthetic peptide
PNETQNNSTSWPVFKSTEQKYLTLNTESTRIMTKLRA

SEQ ID NO: 18558 - protein, 37 aa, Artificial sequence
  synthetic peptide
NETQNNSTSWPVFKSTEQKYLTLNTESTRIMTKLRAQ

SEQ ID NO: 18559 - protein, 37 aa, Artificial sequence
  synthetic peptide
ETQNNSTSWPVFKSTEQKYLTLNTESTRIMTKLRAQQ

SEQ ID NO: 18560 - protein, 37 aa, Artificial sequence
  synthetic peptide
TQNNSTSWPVFKSTEQKYLTLNTESTRIMTKLRAQQC

SEQ ID NO: 18561 - protein, 37 aa, Artificial sequence
  synthetic peptide
QNNSTSWPVFKSTEQKYLTLNTESTRIMTKLRAQQCR

SEQ ID NO: 18562 - protein, 37 aa, Artificial sequence
  synthetic peptide
NNSTSWPVFKSTEQKYLTLNTESTRIMTKLRAQQCRF

SEQ ID NO: 18563 - protein, 37 aa, Artificial sequence
  synthetic peptide
NSTSWPVFKSTEQKYLTLNTESTRIMTKLRAQQCRFW

SEQ ID NO: 18564 - protein, 37 aa, Artificial sequence
  synthetic peptide
STSWPVFKSTEQKYLTLNTESTRIMTKLRAQQCRFWT

SEQ ID NO: 18565 - protein, 37 aa, Artificial sequence
  synthetic peptide
TSWPVFKSTEQKYLTLNTESTRIMTKLRAQQCRFWTS

SEQ ID NO: 18566 - protein, 37 aa, Artificial sequence
  synthetic peptide
SWPVFKSTEQKYLTLNTESTRIMTKLRAQQCRFWTSF

SEQ ID NO: 18567 - protein, 37 aa, Artificial sequence
  synthetic peptide
WPVFKSTEQKYLTLNTESTRIMTKLRAQQCRFWTSFF

SEQ ID NO: 18568 - protein, 37 aa, Artificial sequence
  synthetic peptide
PVFKSTEQKYLTLNTESTRIMTKLRAQQCRFWTSFFP

SEQ ID NO: 18569 - protein, 37 aa, Artificial sequence
  synthetic peptide
VFKSTEQKYLTLNTESTRIMTKLRAQQCRFWTSFFPK

SEQ ID NO: 18570 - protein, 37 aa, Artificial sequence
  synthetic peptide
FKSTEQKYLTLNTESTRIMTKLRAQQCRFWTSFFPKV

SEQ ID NO: 18571 - protein, 37 aa, Artificial sequence
  synthetic peptide
KSTEQKYLTLNTESTRIMTKLRAQQCRFWTSFFPKVL

SEQ ID NO: 18572 - protein, 37 aa, Artificial sequence
  synthetic peptide
STEQKYLTLNTESTRIMTKLRAQQCRFWTSFFPKVLE

SEQ ID NO: 18573 - protein, 37 aa, Artificial sequence
  synthetic peptide
TEQKYLTLNTESTRIMTKLRAQQCRFWTSFFPKVLEM

SEQ ID NO: 18574 - protein, 37 aa, Artificial sequence
  synthetic peptide
EQKYLTLNTESTRIMTKLRAQQCRFWTSFFPKVLEMT

SEQ ID NO: 18575 - protein, 37 aa, Artificial sequence
  synthetic peptide
QKYLTLNTESTRIMTKLRAQQCRFWTSFFPKVLEMTG

SEQ ID NO: 18576 - protein, 37 aa, Artificial sequence
  synthetic peptide
KYLTLNTESTRIMTKLRAQQCRFWTSFFPKVLEMTGN

SEQ ID NO: 18577 - protein, 37 aa, Artificial sequence
  synthetic peptide
YLTLNTESTRIMTKLRAQQCRFWTSFFPKVLEMTGNI

SEQ ID NO: 18578 - protein, 37 aa, Artificial sequence
  synthetic peptide
LTLNTESTRIMTKLRAQQCRFWTSFFPKVLEMTGNID

SEQ ID NO: 18579 - protein, 37 aa, Artificial sequence
  synthetic peptide
TLNTESTRIMTKLRAQQCRFWTSFFPKVLEMTGNIDE

SEQ ID NO: 18580 - protein, 37 aa, Artificial sequence
  synthetic peptide
LNTESTRIMTKLRAQQCRFWTSFFPKVLEMTGNIDEA

SEQ ID NO: 18581 - protein, 37 aa, Artificial sequence
  synthetic peptide
NTESTRIMTKLRAQQCRFWTSFFPKVLEMTGNIDEAE

SEQ ID NO: 18582 - protein, 37 aa, Artificial sequence
  synthetic peptide
TESTRIMTKLRAQQCRFWTSFFPKVLEMTGNIDEAEW

SEQ ID NO: 18583 - protein, 37 aa, Artificial sequence
  synthetic peptide
ESTRIMTKLRAQQCRFWTSFFPKVLEMTGNIDEAEWE

SEQ ID NO: 18584 - protein, 37 aa, Artificial sequence
  synthetic peptide
STRIMTKLRAQQCRFWTSFFPKVLEMTGNIDEAEWEW

SEQ ID NO: 18585 - protein, 37 aa, Artificial sequence
  synthetic peptide
TRIMTKLRAQQCRFWTSFFPKVLEMTGNIDEAEWEWK

SEQ ID NO: 18586 - protein, 37 aa, Artificial sequence
  synthetic peptide
RIMTKLRAQQCRFWTSFFPKVLEMTGNIDEAEWEWKA

SEQ ID NO: 18587 - protein, 37 aa, Artificial sequence
  synthetic peptide
IMTKLRAQQCRFWTSFFPKVLEMTGNIDEAEWEWKAG

SEQ ID NO: 18588 - protein, 37 aa, Artificial sequence
  synthetic peptide
MTKLRAQQCRFWTSFFPKVLEMTGNIDEAEWEWKAGF

SEQ ID NO: 18589 - protein, 37 aa, Artificial sequence
  synthetic peptide
TKLRAQQCRFWTSFFPKVLEMTGNIDEAEWEWKAGFH

SEQ ID NO: 18590 - protein, 37 aa, Artificial sequence
  synthetic peptide
KLRAQQCRFWTSFFPKVLEMTGNIDEAEWEWKAGFHR

SEQ ID NO: 18591 - protein, 37 aa, Artificial sequence
  synthetic peptide
LRAQQCRFWTSFFPKVLEMTGNIDEAEWEWKAGFHRW

SEQ ID NO: 18592 - protein, 37 aa, Artificial sequence
  synthetic peptide
RAQQCRFWTSFFPKVLEMTGNIDEAEWEWKAGFHRWN

SEQ ID NO: 18593 - protein, 37 aa, Artificial sequence
  synthetic peptide
AQQCRFWTSFFPKVLEMTGNIDEAEWEWKAGFHRWNN

SEQ ID NO: 18594 - protein, 37 aa, Artificial sequence
  synthetic peptide
QQCRFWTSFFPKVLEMTGNIDEAEWEWKAGFHRWNNY

SEQ ID NO: 18595 - protein, 37 aa, Artificial sequence
  synthetic peptide
QCRFWTSFFPKVLEMTGNIDEAEWEWKAGFHRWNNYM

SEQ ID NO: 18596 - protein, 37 aa, Artificial sequence
  synthetic peptide
CRFWTSFFPKVLEMTGNIDEAEWEWKAGFHRWNNYMM

SEQ ID NO: 18597 - protein, 37 aa, Artificial sequence
  synthetic peptide
RFWTSFFPKVLEMTGNIDEAEWEWKAGFHRWNNYMMD

SEQ ID NO: 18598 - protein, 37 aa, Artificial sequence
  synthetic peptide
FWTSFFPKVLEMTGNIDEAEWEWKAGFHRWNNYMMDW

SEQ ID NO: 18599 - protein, 37 aa, Artificial sequence
  synthetic peptide
WTSFFPKVLEMTGNIDEAEWEWKAGFHRWNNYMMDWK

SEQ ID NO: 18600 - protein, 37 aa, Artificial sequence
  synthetic peptide
TSFFPKVLEMTGNIDEAEWEWKAGFHRWNNYMMDWKN

SEQ ID NO: 18601 - protein, 37 aa, Artificial sequence
  synthetic peptide
SFFPKVLEMTGNIDEAEWEWKAGFHRWNNYMMDWKNQ

SEQ ID NO: 18602 - protein, 37 aa, Artificial sequence
  synthetic peptide
FFPKVLEMTGNIDEAEWEWKAGFHRWNNYMMDWKNQF

SEQ ID NO: 18603 - protein, 37 aa, Artificial sequence
  synthetic peptide
FPKVLEMTGNIDEAEWEWKAGFHRWNNYMMDWKNQFN

SEQ ID NO: 18604 - protein, 37 aa, Artificial sequence
  synthetic peptide
PKVLEMTGNIDEAEWEWKAGFHRWNNYMMDWKNQFND

SEQ ID NO: 18605 - protein, 37 aa, Artificial sequence
  synthetic peptide
KVLEMTGNIDEAEWEWKAGFHRWNNYMMDWKNQFNDY

SEQ ID NO: 18606 - protein, 37 aa, Artificial sequence
  synthetic peptide
VLEMTGNIDEAEWEWKAGFHRWNNYMMDWKNQFNDYT

SEQ ID NO: 18607 - protein, 37 aa, Artificial sequence
  synthetic peptide
LEMTGNIDEAEWEWKAGFHRWNNYMMDWKNQFNDYTS

SEQ ID NO: 18608 - protein, 37 aa, Artificial sequence
  synthetic peptide
EMTGNIDEAEWEWKAGFHRWNNYMMDWKNQFNDYTSK

SEQ ID NO: 18609 - protein, 37 aa, Artificial sequence
  synthetic peptide
MTGNIDEAEWEWKAGFHRWNNYMMDWKNQFNDYTSKK

SEQ ID NO: 18610 - protein, 37 aa, Artificial sequence
  synthetic peptide
TGNIDEAEWEWKAGFHRWNNYMMDWKNQFNDYTSKKE

SEQ ID NO: 18611 - protein, 37 aa, Artificial sequence
  synthetic peptide
GNIDEAEWEWKAGFHRWNNYMMDWKNQFNDYTSKKES

SEQ ID NO: 18612 - protein, 37 aa, Artificial sequence
  synthetic peptide
NIDEAEWEWKAGFHRWNNYMMDWKNQFNDYTSKKESC

SEQ ID NO: 18613 - protein, 37 aa, Artificial sequence
  synthetic peptide
IDEAEWEWKAGFHRWNNYMMDWKNQFNDYTSKKESCV

SEQ ID NO: 18614 - protein, 37 aa, Artificial sequence
  synthetic peptide
DEAEWEWKAGFHRWNNYMMDWKNQFNDYTSKKESCVG

SEQ ID NO: 18615 - protein, 37 aa, Artificial sequence
  synthetic peptide
EAEWEWKAGFHRWNNYMMDWKNQFNDYTSKKESCVGL

SEQ ID NO: 18616 - protein, 38 aa, Artificial sequence
  synthetic peptide
MHSKVTIICIRFLFWFLLLCMLIGKSHTEDDIIIATKN

SEQ ID NO: 18617 - protein, 38 aa, Artificial sequence
  synthetic peptide
HSKVTIICIRFLFWFLLLCMLIGKSHTEDDIIIATKNG

SEQ ID NO: 18618 - protein, 38 aa, Artificial sequence
  synthetic peptide
SKVTIICIRFLFWFLLLCMLIGKSHTEDDIIIATKNGK

SEQ ID NO: 18619 - protein, 38 aa, Artificial sequence
  synthetic peptide
KVTIICIRFLFWFLLLCMLIGKSHTEDDIIIATKNGKV

SEQ ID NO: 18620 - protein, 38 aa, Artificial sequence
  synthetic peptide
VTIICIRFLFWFLLLCMLIGKSHTEDDIIIATKNGKVR

SEQ ID NO: 18621 - protein, 38 aa, Artificial sequence
  synthetic peptide
TIICIRFLFWFLLLCMLIGKSHTEDDIIIATKNGKVRG

SEQ ID NO: 18622 - protein, 38 aa, Artificial sequence
  synthetic peptide
IICIRFLFWFLLLCMLIGKSHTEDDIIIATKNGKVRGM

SEQ ID NO: 18623 - protein, 38 aa, Artificial sequence
  synthetic peptide
ICIRFLFWFLLLCMLIGKSHTEDDIIIATKNGKVRGMN

SEQ ID NO: 18624 - protein, 38 aa, Artificial sequence
  synthetic peptide
CIRFLFWFLLLCMLIGKSHTEDDIIIATKNGKVRGMNL

SEQ ID NO: 18625 - protein, 38 aa, Artificial sequence
  synthetic peptide
IRFLFWFLLLCMLIGKSHTEDDIIIATKNGKVRGMNLT

SEQ ID NO: 18626 - protein, 38 aa, Artificial sequence
  synthetic peptide
RFLFWFLLLCMLIGKSHTEDDIIIATKNGKVRGMNLTV

SEQ ID NO: 18627 - protein, 38 aa, Artificial sequence
  synthetic peptide
FLFWFLLLCMLIGKSHTEDDIIIATKNGKVRGMNLTVF

SEQ ID NO: 18628 - protein, 38 aa, Artificial sequence
  synthetic peptide
LFWFLLLCMLIGKSHTEDDIIIATKNGKVRGMNLTVFG

SEQ ID NO: 18629 - protein, 38 aa, Artificial sequence
  synthetic peptide
FWFLLLCMLIGKSHTEDDIIIATKNGKVRGMNLTVFGG

SEQ ID NO: 18630 - protein, 38 aa, Artificial sequence
  synthetic peptide
WFLLLCMLIGKSHTEDDIIIATKNGKVRGMNLTVFGGT

SEQ ID NO: 18631 - protein, 38 aa, Artificial sequence
  synthetic peptide
FLLLCMLIGKSHTEDDIIIATKNGKVRGMNLTVFGGTV

SEQ ID NO: 18632 - protein, 38 aa, Artificial sequence
  synthetic peptide
LLLCMLIGKSHTEDDIIIATKNGKVRGMNLTVFGGTVT

SEQ ID NO: 18633 - protein, 38 aa, Artificial sequence
  synthetic peptide
LLCMLIGKSHTEDDIIIATKNGKVRGMNLTVFGGTVTA

SEQ ID NO: 18634 - protein, 38 aa, Artificial sequence
  synthetic peptide
LCMLIGKSHTEDDIIIATKNGKVRGMNLTVFGGTVTAF

SEQ ID NO: 18635 - protein, 38 aa, Artificial sequence
  synthetic peptide
CMLIGKSHTEDDIIIATKNGKVRGMNLTVFGGTVTAFL

SEQ ID NO: 18636 - protein, 38 aa, Artificial sequence
  synthetic peptide
MLIGKSHTEDDIIIATKNGKVRGMNLTVFGGTVTAFLG

SEQ ID NO: 18637 - protein, 38 aa, Artificial sequence
  synthetic peptide
LIGKSHTEDDIIIATKNGKVRGMNLTVFGGTVTAFLGI

SEQ ID NO: 18638 - protein, 38 aa, Artificial sequence
  synthetic peptide
IGKSHTEDDIIIATKNGKVRGMNLTVFGGTVTAFLGIP

SEQ ID NO: 18639 - protein, 38 aa, Artificial sequence
  synthetic peptide
GKSHTEDDIIIATKNGKVRGMNLTVFGGTVTAFLGIPY

SEQ ID NO: 18640 - protein, 38 aa, Artificial sequence
  synthetic peptide
KSHTEDDIIIATKNGKVRGMNLTVFGGTVTAFLGIPYA

SEQ ID NO: 18641 - protein, 38 aa, Artificial sequence
  synthetic peptide
SHTEDDIIIATKNGKVRGMNLTVFGGTVTAFLGIPYAQ

SEQ ID NO: 18642 - protein, 38 aa, Artificial sequence
  synthetic peptide
HTEDDIIIATKNGKVRGMNLTVFGGTVTAFLGIPYAQP

SEQ ID NO: 18643 - protein, 38 aa, Artificial sequence
  synthetic peptide
TEDDIIIATKNGKVRGMNLTVFGGTVTAFLGIPYAQPP

SEQ ID NO: 18644 - protein, 38 aa, Artificial sequence
  synthetic peptide
EDDIIIATKNGKVRGMNLTVFGGTVTAFLGIPYAQPPL

SEQ ID NO: 18645 - protein, 38 aa, Artificial sequence
  synthetic peptide
DDIIIATKNGKVRGMNLTVFGGTVTAFLGIPYAQPPLG

SEQ ID NO: 18646 - protein, 38 aa, Artificial sequence
  synthetic peptide
DIIIATKNGKVRGMNLTVFGGTVTAFLGIPYAQPPLGR

SEQ ID NO: 18647 - protein, 38 aa, Artificial sequence
  synthetic peptide
IIIATKNGKVRGMNLTVFGGTVTAFLGIPYAQPPLGRL

SEQ ID NO: 18648 - protein, 38 aa, Artificial sequence
  synthetic peptide
IIATKNGKVRGMNLTVFGGTVTAFLGIPYAQPPLGRLR

SEQ ID NO: 18649 - protein, 38 aa, Artificial sequence
  synthetic peptide
IATKNGKVRGMNLTVFGGTVTAFLGIPYAQPPLGRLRF

SEQ ID NO: 18650 - protein, 38 aa, Artificial sequence
  synthetic peptide
ATKNGKVRGMNLTVFGGTVTAFLGIPYAQPPLGRLRFK

SEQ ID NO: 18651 - protein, 38 aa, Artificial sequence
  synthetic peptide
TKNGKVRGMNLTVFGGTVTAFLGIPYAQPPLGRLRFKK

SEQ ID NO: 18652 - protein, 38 aa, Artificial sequence
  synthetic peptide
KNGKVRGMNLTVFGGTVTAFLGIPYAQPPLGRLRFKKP

SEQ ID NO: 18653 - protein, 38 aa, Artificial sequence
  synthetic peptide
NGKVRGMNLTVFGGTVTAFLGIPYAQPPLGRLRFKKPQ

SEQ ID NO: 18654 - protein, 38 aa, Artificial sequence
  synthetic peptide
GKVRGMNLTVFGGTVTAFLGIPYAQPPLGRLRFKKPQS

SEQ ID NO: 18655 - protein, 38 aa, Artificial sequence
  synthetic peptide
KVRGMNLTVFGGTVTAFLGIPYAQPPLGRLRFKKPQSL

SEQ ID NO: 18656 - protein, 38 aa, Artificial sequence
  synthetic peptide
VRGMNLTVFGGTVTAFLGIPYAQPPLGRLRFKKPQSLT

SEQ ID NO: 18657 - protein, 38 aa, Artificial sequence
  synthetic peptide
RGMNLTVFGGTVTAFLGIPYAQPPLGRLRFKKPQSLTK

SEQ ID NO: 18658 - protein, 38 aa, Artificial sequence
  synthetic peptide
GMNLTVFGGTVTAFLGIPYAQPPLGRLRFKKPQSLTKW

SEQ ID NO: 18659 - protein, 38 aa, Artificial sequence
  synthetic peptide
MNLTVFGGTVTAFLGIPYAQPPLGRLRFKKPQSLTKWS

SEQ ID NO: 18660 - protein, 38 aa, Artificial sequence
  synthetic peptide
NLTVFGGTVTAFLGIPYAQPPLGRLRFKKPQSLTKWSD

SEQ ID NO: 18661 - protein, 38 aa, Artificial sequence
  synthetic peptide
LTVFGGTVTAFLGIPYAQPPLGRLRFKKPQSLTKWSDI

SEQ ID NO: 18662 - protein, 38 aa, Artificial sequence
  synthetic peptide
TVFGGTVTAFLGIPYAQPPLGRLRFKKPQSLTKWSDIW

SEQ ID NO: 18663 - protein, 38 aa, Artificial sequence
  synthetic peptide
VFGGTVTAFLGIPYAQPPLGRLRFKKPQSLTKWSDIWN

SEQ ID NO: 18664 - protein, 38 aa, Artificial sequence
  synthetic peptide
FGGTVTAFLGIPYAQPPLGRLRFKKPQSLTKWSDIWNA

SEQ ID NO: 18665 - protein, 38 aa, Artificial sequence
  synthetic peptide
GGTVTAFLGIPYAQPPLGRLRFKKPQSLTKWSDIWNAT

SEQ ID NO: 18666 - protein, 38 aa, Artificial sequence
  synthetic peptide
GTVTAFLGIPYAQPPLGRLRFKKPQSLTKWSDIWNATK

SEQ ID NO: 18667 - protein, 38 aa, Artificial sequence
  synthetic peptide
TVTAFLGIPYAQPPLGRLRFKKPQSLTKWSDIWNATKY

SEQ ID NO: 18668 - protein, 38 aa, Artificial sequence
  synthetic peptide
VTAFLGIPYAQPPLGRLRFKKPQSLTKWSDIWNATKYA

SEQ ID NO: 18669 - protein, 38 aa, Artificial sequence
  synthetic peptide
TAFLGIPYAQPPLGRLRFKKPQSLTKWSDIWNATKYAN

SEQ ID NO: 18670 - protein, 38 aa, Artificial sequence
  synthetic peptide
AFLGIPYAQPPLGRLRFKKPQSLTKWSDIWNATKYANS

SEQ ID NO: 18671 - protein, 38 aa, Artificial sequence
  synthetic peptide
FLGIPYAQPPLGRLRFKKPQSLTKWSDIWNATKYANSC

SEQ ID NO: 18672 - protein, 38 aa, Artificial sequence
  synthetic peptide
LGIPYAQPPLGRLRFKKPQSLTKWSDIWNATKYANSCC

SEQ ID NO: 18673 - protein, 38 aa, Artificial sequence
  synthetic peptide
GIPYAQPPLGRLRFKKPQSLTKWSDIWNATKYANSCCQ

SEQ ID NO: 18674 - protein, 38 aa, Artificial sequence
  synthetic peptide
IPYAQPPLGRLRFKKPQSLTKWSDIWNATKYANSCCQN

SEQ ID NO: 18675 - protein, 38 aa, Artificial sequence
  synthetic peptide
PYAQPPLGRLRFKKPQSLTKWSDIWNATKYANSCCQNI

SEQ ID NO: 18676 - protein, 38 aa, Artificial sequence
  synthetic peptide
YAQPPLGRLRFKKPQSLTKWSDIWNATKYANSCCQNID

SEQ ID NO: 18677 - protein, 38 aa, Artificial sequence
  synthetic peptide
AQPPLGRLRFKKPQSLTKWSDIWNATKYANSCCQNIDQ

SEQ ID NO: 18678 - protein, 38 aa, Artificial sequence
  synthetic peptide
QPPLGRLRFKKPQSLTKWSDIWNATKYANSCCQNIDQS

SEQ ID NO: 18679 - protein, 38 aa, Artificial sequence
  synthetic peptide
PPLGRLRFKKPQSLTKWSDIWNATKYANSCCQNIDQSF

SEQ ID NO: 18680 - protein, 38 aa, Artificial sequence
  synthetic peptide
PLGRLRFKKPQSLTKWSDIWNATKYANSCCQNIDQSFP

SEQ ID NO: 18681 - protein, 38 aa, Artificial sequence
  synthetic peptide
LGRLRFKKPQSLTKWSDIWNATKYANSCCQNIDQSFPG

SEQ ID NO: 18682 - protein, 38 aa, Artificial sequence
  synthetic peptide
GRLRFKKPQSLTKWSDIWNATKYANSCCQNIDQSFPGF

SEQ ID NO: 18683 - protein, 38 aa, Artificial sequence
  synthetic peptide
RLRFKKPQSLTKWSDIWNATKYANSCCQNIDQSFPGFH

SEQ ID NO: 18684 - protein, 38 aa, Artificial sequence
  synthetic peptide
LRFKKPQSLTKWSDIWNATKYANSCCQNIDQSFPGFHG

SEQ ID NO: 18685 - protein, 38 aa, Artificial sequence
  synthetic peptide
RFKKPQSLTKWSDIWNATKYANSCCQNIDQSFPGFHGS

SEQ ID NO: 18686 - protein, 38 aa, Artificial sequence
  synthetic peptide
FKKPQSLTKWSDIWNATKYANSCCQNIDQSFPGFHGSE

SEQ ID NO: 18687 - protein, 38 aa, Artificial sequence
  synthetic peptide
KKPQSLTKWSDIWNATKYANSCCQNIDQSFPGFHGSEM

SEQ ID NO: 18688 - protein, 38 aa, Artificial sequence
  synthetic peptide
KPQSLTKWSDIWNATKYANSCCQNIDQSFPGFHGSEMW

SEQ ID NO: 18689 - protein, 38 aa, Artificial sequence
  synthetic peptide
PQSLTKWSDIWNATKYANSCCQNIDQSFPGFHGSEMWN

SEQ ID NO: 18690 - protein, 38 aa, Artificial sequence
  synthetic peptide
QSLTKWSDIWNATKYANSCCQNIDQSFPGFHGSEMWNP

SEQ ID NO: 18691 - protein, 38 aa, Artificial sequence
  synthetic peptide
SLTKWSDIWNATKYANSCCQNIDQSFPGFHGSEMWNPN

SEQ ID NO: 18692 - protein, 38 aa, Artificial sequence
  synthetic peptide
LTKWSDIWNATKYANSCCQNIDQSFPGFHGSEMWNPNT

SEQ ID NO: 18693 - protein, 38 aa, Artificial sequence
  synthetic peptide
TKWSDIWNATKYANSCCQNIDQSFPGFHGSEMWNPNTD

SEQ ID NO: 18694 - protein, 38 aa, Artificial sequence
  synthetic peptide
KWSDIWNATKYANSCCQNIDQSFPGFHGSEMWNPNTDL

SEQ ID NO: 18695 - protein, 38 aa, Artificial sequence
  synthetic peptide
WSDIWNATKYANSCCQNIDQSFPGFHGSEMWNPNTDLS

SEQ ID NO: 18696 - protein, 38 aa, Artificial sequence
  synthetic peptide
SDIWNATKYANSCCQNIDQSFPGFHGSEMWNPNTDLSE

SEQ ID NO: 18697 - protein, 38 aa, Artificial sequence
  synthetic peptide
DIWNATKYANSCCQNIDQSFPGFHGSEMWNPNTDLSED

SEQ ID NO: 18698 - protein, 38 aa, Artificial sequence
  synthetic peptide
IWNATKYANSCCQNIDQSFPGFHGSEMWNPNTDLSEDC

SEQ ID NO: 18699 - protein, 38 aa, Artificial sequence
  synthetic peptide
WNATKYANSCCQNIDQSFPGFHGSEMWNPNTDLSEDCL

SEQ ID NO: 18700 - protein, 38 aa, Artificial sequence
  synthetic peptide
NATKYANSCCQNIDQSFPGFHGSEMWNPNTDLSEDCLY

SEQ ID NO: 18701 - protein, 38 aa, Artificial sequence
  synthetic peptide
ATKYANSCCQNIDQSFPGFHGSEMWNPNTDLSEDCLYL

SEQ ID NO: 18702 - protein, 38 aa, Artificial sequence
  synthetic peptide
TKYANSCCQNIDQSFPGFHGSEMWNPNTDLSEDCLYLN

SEQ ID NO: 18703 - protein, 38 aa, Artificial sequence
  synthetic peptide
KYANSCCQNIDQSFPGFHGSEMWNPNTDLSEDCLYLNV

SEQ ID NO: 18704 - protein, 38 aa, Artificial sequence
  synthetic peptide
YANSCCQNIDQSFPGFHGSEMWNPNTDLSEDCLYLNVW

SEQ ID NO: 18705 - protein, 38 aa, Artificial sequence
  synthetic peptide
ANSCCQNIDQSFPGFHGSEMWNPNTDLSEDCLYLNVWI

SEQ ID NO: 18706 - protein, 38 aa, Artificial sequence
  synthetic peptide
NSCCQNIDQSFPGFHGSEMWNPNTDLSEDCLYLNVWIP

SEQ ID NO: 18707 - protein, 38 aa, Artificial sequence
  synthetic peptide
SCCQNIDQSFPGFHGSEMWNPNTDLSEDCLYLNVWIPA

SEQ ID NO: 18708 - protein, 38 aa, Artificial sequence
  synthetic peptide
CCQNIDQSFPGFHGSEMWNPNTDLSEDCLYLNVWIPAP

SEQ ID NO: 18709 - protein, 38 aa, Artificial sequence
  synthetic peptide
CQNIDQSFPGFHGSEMWNPNTDLSEDCLYLNVWIPAPK

SEQ ID NO: 18710 - protein, 38 aa, Artificial sequence
  synthetic peptide
QNIDQSFPGFHGSEMWNPNTDLSEDCLYLNVWIPAPKP

SEQ ID NO: 18711 - protein, 38 aa, Artificial sequence
  synthetic peptide
NIDQSFPGFHGSEMWNPNTDLSEDCLYLNVWIPAPKPK

SEQ ID NO: 18712 - protein, 38 aa, Artificial sequence
  synthetic peptide
IDQSFPGFHGSEMWNPNTDLSEDCLYLNVWIPAPKPKN

SEQ ID NO: 18713 - protein, 38 aa, Artificial sequence
  synthetic peptide
DQSFPGFHGSEMWNPNTDLSEDCLYLNVWIPAPKPKNA

SEQ ID NO: 18714 - protein, 38 aa, Artificial sequence
  synthetic peptide
QSFPGFHGSEMWNPNTDLSEDCLYLNVWIPAPKPKNAT

SEQ ID NO: 18715 - protein, 38 aa, Artificial sequence
  synthetic peptide
SFPGFHGSEMWNPNTDLSEDCLYLNVWIPAPKPKNATV

SEQ ID NO: 18716 - protein, 38 aa, Artificial sequence
  synthetic peptide
FPGFHGSEMWNPNTDLSEDCLYLNVWIPAPKPKNATVL

SEQ ID NO: 18717 - protein, 38 aa, Artificial sequence
  synthetic peptide
PGFHGSEMWNPNTDLSEDCLYLNVWIPAPKPKNATVLI

SEQ ID NO: 18718 - protein, 38 aa, Artificial sequence
  synthetic peptide
GFHGSEMWNPNTDLSEDCLYLNVWIPAPKPKNATVLIW

SEQ ID NO: 18719 - protein, 38 aa, Artificial sequence
  synthetic peptide
FHGSEMWNPNTDLSEDCLYLNVWIPAPKPKNATVLIWI

SEQ ID NO: 18720 - protein, 38 aa, Artificial sequence
  synthetic peptide
HGSEMWNPNTDLSEDCLYLNVWIPAPKPKNATVLIWIY

SEQ ID NO: 18721 - protein, 38 aa, Artificial sequence
  synthetic peptide
GSEMWNPNTDLSEDCLYLNVWIPAPKPKNATVLIWIYG

SEQ ID NO: 18722 - protein, 38 aa, Artificial sequence
  synthetic peptide
SEMWNPNTDLSEDCLYLNVWIPAPKPKNATVLIWIYGG

SEQ ID NO: 18723 - protein, 38 aa, Artificial sequence
  synthetic peptide
EMWNPNTDLSEDCLYLNVWIPAPKPKNATVLIWIYGGG

SEQ ID NO: 18724 - protein, 38 aa, Artificial sequence
  synthetic peptide
MWNPNTDLSEDCLYLNVWIPAPKPKNATVLIWIYGGGF

SEQ ID NO: 18725 - protein, 38 aa, Artificial sequence
  synthetic peptide
WNPNTDLSEDCLYLNVWIPAPKPKNATVLIWIYGGGFQ

SEQ ID NO: 18726 - protein, 38 aa, Artificial sequence
  synthetic peptide
NPNTDLSEDCLYLNVWIPAPKPKNATVLIWIYGGGFQT

SEQ ID NO: 18727 - protein, 38 aa, Artificial sequence
  synthetic peptide
PNTDLSEDCLYLNVWIPAPKPKNATVLIWIYGGGFQTG

SEQ ID NO: 18728 - protein, 38 aa, Artificial sequence
  synthetic peptide
NTDLSEDCLYLNVWIPAPKPKNATVLIWIYGGGFQTGT

SEQ ID NO: 18729 - protein, 38 aa, Artificial sequence
  synthetic peptide
TDLSEDCLYLNVWIPAPKPKNATVLIWIYGGGFQTGTS

SEQ ID NO: 18730 - protein, 38 aa, Artificial sequence
  synthetic peptide
DLSEDCLYLNVWIPAPKPKNATVLIWIYGGGFQTGTSS

SEQ ID NO: 18731 - protein, 38 aa, Artificial sequence
  synthetic peptide
LSEDCLYLNVWIPAPKPKNATVLIWIYGGGFQTGTSSL

SEQ ID NO: 18732 - protein, 38 aa, Artificial sequence
  synthetic peptide
SEDCLYLNVWIPAPKPKNATVLIWIYGGGFQTGTSSLH

SEQ ID NO: 18733 - protein, 38 aa, Artificial sequence
  synthetic peptide
EDCLYLNVWIPAPKPKNATVLIWIYGGGFQTGTSSLHV

SEQ ID NO: 18734 - protein, 38 aa, Artificial sequence
  synthetic peptide
DCLYLNVWIPAPKPKNATVLIWIYGGGFQTGTSSLHVY

SEQ ID NO: 18735 - protein, 38 aa, Artificial sequence
  synthetic peptide
CLYLNVWIPAPKPKNATVLIWIYGGGFQTGTSSLHVYD

SEQ ID NO: 18736 - protein, 38 aa, Artificial sequence
  synthetic peptide
LYLNVWIPAPKPKNATVLIWIYGGGFQTGTSSLHVYDG

SEQ ID NO: 18737 - protein, 38 aa, Artificial sequence
  synthetic peptide
YLNVWIPAPKPKNATVLIWIYGGGFQTGTSSLHVYDGK

SEQ ID NO: 18738 - protein, 38 aa, Artificial sequence
  synthetic peptide
LNVWIPAPKPKNATVLIWIYGGGFQTGTSSLHVYDGKF

SEQ ID NO: 18739 - protein, 38 aa, Artificial sequence
  synthetic peptide
NVWIPAPKPKNATVLIWIYGGGFQTGTSSLHVYDGKFL

SEQ ID NO: 18740 - protein, 38 aa, Artificial sequence
  synthetic peptide
VWIPAPKPKNATVLIWIYGGGFQTGTSSLHVYDGKFLA

SEQ ID NO: 18741 - protein, 38 aa, Artificial sequence
  synthetic peptide
WIPAPKPKNATVLIWIYGGGFQTGTSSLHVYDGKFLAR

SEQ ID NO: 18742 - protein, 38 aa, Artificial sequence
  synthetic peptide
IPAPKPKNATVLIWIYGGGFQTGTSSLHVYDGKFLARV

SEQ ID NO: 18743 - protein, 38 aa, Artificial sequence
  synthetic peptide
PAPKPKNATVLIWIYGGGFQTGTSSLHVYDGKFLARVE

SEQ ID NO: 18744 - protein, 38 aa, Artificial sequence
  synthetic peptide
APKPKNATVLIWIYGGGFQTGTSSLHVYDGKFLARVER

SEQ ID NO: 18745 - protein, 38 aa, Artificial sequence
  synthetic peptide
PKPKNATVLIWIYGGGFQTGTSSLHVYDGKFLARVERV

SEQ ID NO: 18746 - protein, 38 aa, Artificial sequence
  synthetic peptide
KPKNATVLIWIYGGGFQTGTSSLHVYDGKFLARVERVI

SEQ ID NO: 18747 - protein, 38 aa, Artificial sequence
  synthetic peptide
PKNATVLIWIYGGGFQTGTSSLHVYDGKFLARVERVIV

SEQ ID NO: 18748 - protein, 38 aa, Artificial sequence
  synthetic peptide
KNATVLIWIYGGGFQTGTSSLHVYDGKFLARVERVIVV

SEQ ID NO: 18749 - protein, 38 aa, Artificial sequence
  synthetic peptide
NATVLIWIYGGGFQTGTSSLHVYDGKFLARVERVIVVS

SEQ ID NO: 18750 - protein, 38 aa, Artificial sequence
  synthetic peptide
ATVLIWIYGGGFQTGTSSLHVYDGKFLARVERVIVVSM

SEQ ID NO: 18751 - protein, 38 aa, Artificial sequence
  synthetic peptide
TVLIWIYGGGFQTGTSSLHVYDGKFLARVERVIVVSMN

SEQ ID NO: 18752 - protein, 38 aa, Artificial sequence
  synthetic peptide
VLIWIYGGGFQTGTSSLHVYDGKFLARVERVIVVSMNY

SEQ ID NO: 18753 - protein, 38 aa, Artificial sequence
  synthetic peptide
LIWIYGGGFQTGTSSLHVYDGKFLARVERVIVVSMNYR

SEQ ID NO: 18754 - protein, 38 aa, Artificial sequence
  synthetic peptide
IWIYGGGFQTGTSSLHVYDGKFLARVERVIVVSMNYRV

SEQ ID NO: 18755 - protein, 38 aa, Artificial sequence
  synthetic peptide
WIYGGGFQTGTSSLHVYDGKFLARVERVIVVSMNYRVG

SEQ ID NO: 18756 - protein, 38 aa, Artificial sequence
  synthetic peptide
IYGGGFQTGTSSLHVYDGKFLARVERVIVVSMNYRVGA

SEQ ID NO: 18757 - protein, 38 aa, Artificial sequence
  synthetic peptide
YGGGFQTGTSSLHVYDGKFLARVERVIVVSMNYRVGAL

SEQ ID NO: 18758 - protein, 38 aa, Artificial sequence
  synthetic peptide
GGGFQTGTSSLHVYDGKFLARVERVIVVSMNYRVGALG

SEQ ID NO: 18759 - protein, 38 aa, Artificial sequence
  synthetic peptide
GGFQTGTSSLHVYDGKFLARVERVIVVSMNYRVGALGF

SEQ ID NO: 18760 - protein, 38 aa, Artificial sequence
  synthetic peptide
GFQTGTSSLHVYDGKFLARVERVIVVSMNYRVGALGFL

SEQ ID NO: 18761 - protein, 38 aa, Artificial sequence
  synthetic peptide
FQTGTSSLHVYDGKFLARVERVIVVSMNYRVGALGFLA

SEQ ID NO: 18762 - protein, 38 aa, Artificial sequence
  synthetic peptide
QTGTSSLHVYDGKFLARVERVIVVSMNYRVGALGFLAL

SEQ ID NO: 18763 - protein, 38 aa, Artificial sequence
  synthetic peptide
TGTSSLHVYDGKFLARVERVIVVSMNYRVGALGFLALP

SEQ ID NO: 18764 - protein, 38 aa, Artificial sequence
  synthetic peptide
GTSSLHVYDGKFLARVERVIVVSMNYRVGALGFLALPG

SEQ ID NO: 18765 - protein, 38 aa, Artificial sequence
  synthetic peptide
TSSLHVYDGKFLARVERVIVVSMNYRVGALGFLALPGN

SEQ ID NO: 18766 - protein, 38 aa, Artificial sequence
  synthetic peptide
SSLHVYDGKFLARVERVIVVSMNYRVGALGFLALPGNP

SEQ ID NO: 18767 - protein, 38 aa, Artificial sequence
  synthetic peptide
SLHVYDGKFLARVERVIVVSMNYRVGALGFLALPGNPE

SEQ ID NO: 18768 - protein, 38 aa, Artificial sequence
  synthetic peptide
LHVYDGKFLARVERVIVVSMNYRVGALGFLALPGNPEA

SEQ ID NO: 18769 - protein, 38 aa, Artificial sequence
  synthetic peptide
HVYDGKFLARVERVIVVSMNYRVGALGFLALPGNPEAP

SEQ ID NO: 18770 - protein, 38 aa, Artificial sequence
  synthetic peptide
VYDGKFLARVERVIVVSMNYRVGALGFLALPGNPEAPG

SEQ ID NO: 18771 - protein, 38 aa, Artificial sequence
  synthetic peptide
YDGKFLARVERVIVVSMNYRVGALGFLALPGNPEAPGN

SEQ ID NO: 18772 - protein, 38 aa, Artificial sequence
  synthetic peptide
DGKFLARVERVIVVSMNYRVGALGFLALPGNPEAPGNM

SEQ ID NO: 18773 - protein, 38 aa, Artificial sequence
  synthetic peptide
GKFLARVERVIVVSMNYRVGALGFLALPGNPEAPGNMG

SEQ ID NO: 18774 - protein, 38 aa, Artificial sequence
  synthetic peptide
KFLARVERVIVVSMNYRVGALGFLALPGNPEAPGNMGL

SEQ ID NO: 18775 - protein, 38 aa, Artificial sequence
  synthetic peptide
FLARVERVIVVSMNYRVGALGFLALPGNPEAPGNMGLF

SEQ ID NO: 18776 - protein, 38 aa, Artificial sequence
  synthetic peptide
LARVERVIVVSMNYRVGALGFLALPGNPEAPGNMGLFD

SEQ ID NO: 18777 - protein, 38 aa, Artificial sequence
  synthetic peptide
ARVERVIVVSMNYRVGALGFLALPGNPEAPGNMGLFDQ

SEQ ID NO: 18778 - protein, 38 aa, Artificial sequence
  synthetic peptide
RVERVIVVSMNYRVGALGFLALPGNPEAPGNMGLFDQQ

SEQ ID NO: 18779 - protein, 38 aa, Artificial sequence
  synthetic peptide
VERVIVVSMNYRVGALGFLALPGNPEAPGNMGLFDQQL

SEQ ID NO: 18780 - protein, 38 aa, Artificial sequence
  synthetic peptide
ERVIVVSMNYRVGALGFLALPGNPEAPGNMGLFDQQLA

SEQ ID NO: 18781 - protein, 38 aa, Artificial sequence
  synthetic peptide
RVIVVSMNYRVGALGFLALPGNPEAPGNMGLFDQQLAL

SEQ ID NO: 18782 - protein, 38 aa, Artificial sequence
  synthetic peptide
VIVVSMNYRVGALGFLALPGNPEAPGNMGLFDQQLALQ

SEQ ID NO: 18783 - protein, 38 aa, Artificial sequence
  synthetic peptide
IVVSMNYRVGALGFLALPGNPEAPGNMGLFDQQLALQW

SEQ ID NO: 18784 - protein, 38 aa, Artificial sequence
  synthetic peptide
VVSMNYRVGALGFLALPGNPEAPGNMGLFDQQLALQWV

SEQ ID NO: 18785 - protein, 38 aa, Artificial sequence
  synthetic peptide
VSMNYRVGALGFLALPGNPEAPGNMGLFDQQLALQWVQ

SEQ ID NO: 18786 - protein, 38 aa, Artificial sequence
  synthetic peptide
SMNYRVGALGFLALPGNPEAPGNMGLFDQQLALQWVQK

SEQ ID NO: 18787 - protein, 38 aa, Artificial sequence
  synthetic peptide
MNYRVGALGFLALPGNPEAPGNMGLFDQQLALQWVQKN

SEQ ID NO: 18788 - protein, 38 aa, Artificial sequence
  synthetic peptide
NYRVGALGFLALPGNPEAPGNMGLFDQQLALQWVQKNI

SEQ ID NO: 18789 - protein, 38 aa, Artificial sequence
  synthetic peptide
YRVGALGFLALPGNPEAPGNMGLFDQQLALQWVQKNIA

SEQ ID NO: 18790 - protein, 38 aa, Artificial sequence
  synthetic peptide
RVGALGFLALPGNPEAPGNMGLFDQQLALQWVQKNIAA

SEQ ID NO: 18791 - protein, 38 aa, Artificial sequence
  synthetic peptide
VGALGFLALPGNPEAPGNMGLFDQQLALQWVQKNIAAF

SEQ ID NO: 18792 - protein, 38 aa, Artificial sequence
  synthetic peptide
GALGFLALPGNPEAPGNMGLFDQQLALQWVQKNIAAFG

SEQ ID NO: 18793 - protein, 38 aa, Artificial sequence
  synthetic peptide
ALGFLALPGNPEAPGNMGLFDQQLALQWVQKNIAAFGG

SEQ ID NO: 18794 - protein, 38 aa, Artificial sequence
  synthetic peptide
LGFLALPGNPEAPGNMGLFDQQLALQWVQKNIAAFGGN

SEQ ID NO: 18795 - protein, 38 aa, Artificial sequence
  synthetic peptide
GFLALPGNPEAPGNMGLFDQQLALQWVQKNIAAFGGNP

SEQ ID NO: 18796 - protein, 38 aa, Artificial sequence
  synthetic peptide
FLALPGNPEAPGNMGLFDQQLALQWVQKNIAAFGGNPK

SEQ ID NO: 18797 - protein, 38 aa, Artificial sequence
  synthetic peptide
LALPGNPEAPGNMGLFDQQLALQWVQKNIAAFGGNPKS

SEQ ID NO: 18798 - protein, 38 aa, Artificial sequence
  synthetic peptide
ALPGNPEAPGNMGLFDQQLALQWVQKNIAAFGGNPKSV

SEQ ID NO: 18799 - protein, 38 aa, Artificial sequence
  synthetic peptide
LPGNPEAPGNMGLFDQQLALQWVQKNIAAFGGNPKSVT

SEQ ID NO: 18800 - protein, 38 aa, Artificial sequence
  synthetic peptide
PGNPEAPGNMGLFDQQLALQWVQKNIAAFGGNPKSVTL

SEQ ID NO: 18801 - protein, 38 aa, Artificial sequence
  synthetic peptide
GNPEAPGNMGLFDQQLALQWVQKNIAAFGGNPKSVTLF

SEQ ID NO: 18802 - protein, 38 aa, Artificial sequence
  synthetic peptide
NPEAPGNMGLFDQQLALQWVQKNIAAFGGNPKSVTLFG

SEQ ID NO: 18803 - protein, 38 aa, Artificial sequence
  synthetic peptide
PEAPGNMGLFDQQLALQWVQKNIAAFGGNPKSVTLFGE

SEQ ID NO: 18804 - protein, 38 aa, Artificial sequence
  synthetic peptide
EAPGNMGLFDQQLALQWVQKNIAAFGGNPKSVTLFGES

SEQ ID NO: 18805 - protein, 38 aa, Artificial sequence
  synthetic peptide
APGNMGLFDQQLALQWVQKNIAAFGGNPKSVTLFGESA

SEQ ID NO: 18806 - protein, 38 aa, Artificial sequence
  synthetic peptide
PGNMGLFDQQLALQWVQKNIAAFGGNPKSVTLFGESAG

SEQ ID NO: 18807 - protein, 38 aa, Artificial sequence
  synthetic peptide
GNMGLFDQQLALQWVQKNIAAFGGNPKSVTLFGESAGA

SEQ ID NO: 18808 - protein, 38 aa, Artificial sequence
  synthetic peptide
NMGLFDQQLALQWVQKNIAAFGGNPKSVTLFGESAGAA

SEQ ID NO: 18809 - protein, 38 aa, Artificial sequence
  synthetic peptide
MGLFDQQLALQWVQKNIAAFGGNPKSVTLFGESAGAAS

SEQ ID NO: 18810 - protein, 38 aa, Artificial sequence
  synthetic peptide
GLFDQQLALQWVQKNIAAFGGNPKSVTLFGESAGAASV

SEQ ID NO: 18811 - protein, 38 aa, Artificial sequence
  synthetic peptide
LFDQQLALQWVQKNIAAFGGNPKSVTLFGESAGAASVS

SEQ ID NO: 18812 - protein, 38 aa, Artificial sequence
  synthetic peptide
FDQQLALQWVQKNIAAFGGNPKSVTLFGESAGAASVSL

SEQ ID NO: 18813 - protein, 38 aa, Artificial sequence
  synthetic peptide
DQQLALQWVQKNIAAFGGNPKSVTLFGESAGAASVSLH

SEQ ID NO: 18814 - protein, 38 aa, Artificial sequence
  synthetic peptide
QQLALQWVQKNIAAFGGNPKSVTLFGESAGAASVSLHL

SEQ ID NO: 18815 - protein, 38 aa, Artificial sequence
  synthetic peptide
QLALQWVQKNIAAFGGNPKSVTLFGESAGAASVSLHLL

SEQ ID NO: 18816 - protein, 38 aa, Artificial sequence
  synthetic peptide
LALQWVQKNIAAFGGNPKSVTLFGESAGAASVSLHLLS

SEQ ID NO: 18817 - protein, 38 aa, Artificial sequence
  synthetic peptide
ALQWVQKNIAAFGGNPKSVTLFGESAGAASVSLHLLSP

SEQ ID NO: 18818 - protein, 38 aa, Artificial sequence
  synthetic peptide
LQWVQKNIAAFGGNPKSVTLFGESAGAASVSLHLLSPG

SEQ ID NO: 18819 - protein, 38 aa, Artificial sequence
  synthetic peptide
QWVQKNIAAFGGNPKSVTLFGESAGAASVSLHLLSPGS

SEQ ID NO: 18820 - protein, 38 aa, Artificial sequence
  synthetic peptide
WVQKNIAAFGGNPKSVTLFGESAGAASVSLHLLSPGSH

SEQ ID NO: 18821 - protein, 38 aa, Artificial sequence
  synthetic peptide
VQKNIAAFGGNPKSVTLFGESAGAASVSLHLLSPGSHS

SEQ ID NO: 18822 - protein, 38 aa, Artificial sequence
  synthetic peptide
QKNIAAFGGNPKSVTLFGESAGAASVSLHLLSPGSHSL

SEQ ID NO: 18823 - protein, 38 aa, Artificial sequence
  synthetic peptide
KNIAAFGGNPKSVTLFGESAGAASVSLHLLSPGSHSLF

SEQ ID NO: 18824 - protein, 38 aa, Artificial sequence
  synthetic peptide
NIAAFGGNPKSVTLFGESAGAASVSLHLLSPGSHSLFT

SEQ ID NO: 18825 - protein, 38 aa, Artificial sequence
  synthetic peptide
IAAFGGNPKSVTLFGESAGAASVSLHLLSPGSHSLFTR

SEQ ID NO: 18826 - protein, 38 aa, Artificial sequence
  synthetic peptide
AAFGGNPKSVTLFGESAGAASVSLHLLSPGSHSLFTRA

SEQ ID NO: 18827 - protein, 38 aa, Artificial sequence
  synthetic peptide
AFGGNPKSVTLFGESAGAASVSLHLLSPGSHSLFTRAI

SEQ ID NO: 18828 - protein, 38 aa, Artificial sequence
  synthetic peptide
FGGNPKSVTLFGESAGAASVSLHLLSPGSHSLFTRAIL

SEQ ID NO: 18829 - protein, 38 aa, Artificial sequence
  synthetic peptide
GGNPKSVTLFGESAGAASVSLHLLSPGSHSLFTRAILQ

SEQ ID NO: 18830 - protein, 38 aa, Artificial sequence
  synthetic peptide
GNPKSVTLFGESAGAASVSLHLLSPGSHSLFTRAILQS

SEQ ID NO: 18831 - protein, 38 aa, Artificial sequence
  synthetic peptide
NPKSVTLFGESAGAASVSLHLLSPGSHSLFTRAILQSG

SEQ ID NO: 18832 - protein, 38 aa, Artificial sequence
  synthetic peptide
PKSVTLFGESAGAASVSLHLLSPGSHSLFTRAILQSGS

SEQ ID NO: 18833 - protein, 38 aa, Artificial sequence
  synthetic peptide
KSVTLFGESAGAASVSLHLLSPGSHSLFTRAILQSGSF

SEQ ID NO: 18834 - protein, 38 aa, Artificial sequence
  synthetic peptide
SVTLFGESAGAASVSLHLLSPGSHSLFTRAILQSGSFN

SEQ ID NO: 18835 - protein, 38 aa, Artificial sequence
  synthetic peptide
VTLFGESAGAASVSLHLLSPGSHSLFTRAILQSGSFNA

SEQ ID NO: 18836 - protein, 38 aa, Artificial sequence
  synthetic peptide
TLFGESAGAASVSLHLLSPGSHSLFTRAILQSGSFNAP

SEQ ID NO: 18837 - protein, 38 aa, Artificial sequence
  synthetic peptide
LFGESAGAASVSLHLLSPGSHSLFTRAILQSGSFNAPW

SEQ ID NO: 18838 - protein, 38 aa, Artificial sequence
  synthetic peptide
FGESAGAASVSLHLLSPGSHSLFTRAILQSGSFNAPWA

SEQ ID NO: 18839 - protein, 38 aa, Artificial sequence
  synthetic peptide
GESAGAASVSLHLLSPGSHSLFTRAILQSGSFNAPWAV

SEQ ID NO: 18840 - protein, 38 aa, Artificial sequence
  synthetic peptide
ESAGAASVSLHLLSPGSHSLFTRAILQSGSFNAPWAVT

SEQ ID NO: 18841 - protein, 38 aa, Artificial sequence
  synthetic peptide
SAGAASVSLHLLSPGSHSLFTRAILQSGSFNAPWAVTS

SEQ ID NO: 18842 - protein, 38 aa, Artificial sequence
  synthetic peptide
AGAASVSLHLLSPGSHSLFTRAILQSGSFNAPWAVTSL

SEQ ID NO: 18843 - protein, 38 aa, Artificial sequence
  synthetic peptide
GAASVSLHLLSPGSHSLFTRAILQSGSFNAPWAVTSLY

SEQ ID NO: 18844 - protein, 38 aa, Artificial sequence
  synthetic peptide
AASVSLHLLSPGSHSLFTRAILQSGSFNAPWAVTSLYE

SEQ ID NO: 18845 - protein, 38 aa, Artificial sequence
  synthetic peptide
ASVSLHLLSPGSHSLFTRAILQSGSFNAPWAVTSLYEA

SEQ ID NO: 18846 - protein, 38 aa, Artificial sequence
  synthetic peptide
SVSLHLLSPGSHSLFTRAILQSGSFNAPWAVTSLYEAR

SEQ ID NO: 18847 - protein, 38 aa, Artificial sequence
  synthetic peptide
VSLHLLSPGSHSLFTRAILQSGSFNAPWAVTSLYEARN

SEQ ID NO: 18848 - protein, 38 aa, Artificial sequence
  synthetic peptide
SLHLLSPGSHSLFTRAILQSGSFNAPWAVTSLYEARNR

SEQ ID NO: 18849 - protein, 38 aa, Artificial sequence
  synthetic peptide
LHLLSPGSHSLFTRAILQSGSFNAPWAVTSLYEARNRT

SEQ ID NO: 18850 - protein, 38 aa, Artificial sequence
  synthetic peptide
HLLSPGSHSLFTRAILQSGSFNAPWAVTSLYEARNRTL

SEQ ID NO: 18851 - protein, 38 aa, Artificial sequence
  synthetic peptide
LLSPGSHSLFTRAILQSGSFNAPWAVTSLYEARNRTLN

SEQ ID NO: 18852 - protein, 38 aa, Artificial sequence
  synthetic peptide
LSPGSHSLFTRAILQSGSFNAPWAVTSLYEARNRTLNL

SEQ ID NO: 18853 - protein, 38 aa, Artificial sequence
  synthetic peptide
SPGSHSLFTRAILQSGSFNAPWAVTSLYEARNRTLNLA

SEQ ID NO: 18854 - protein, 38 aa, Artificial sequence
  synthetic peptide
PGSHSLFTRAILQSGSFNAPWAVTSLYEARNRTLNLAK

SEQ ID NO: 18855 - protein, 38 aa, Artificial sequence
  synthetic peptide
GSHSLFTRAILQSGSFNAPWAVTSLYEARNRTLNLAKL

SEQ ID NO: 18856 - protein, 38 aa, Artificial sequence
  synthetic peptide
SHSLFTRAILQSGSFNAPWAVTSLYEARNRTLNLAKLT

SEQ ID NO: 18857 - protein, 38 aa, Artificial sequence
  synthetic peptide
HSLFTRAILQSGSFNAPWAVTSLYEARNRTLNLAKLTG

SEQ ID NO: 18858 - protein, 38 aa, Artificial sequence
  synthetic peptide
SLFTRAILQSGSFNAPWAVTSLYEARNRTLNLAKLTGC

SEQ ID NO: 18859 - protein, 38 aa, Artificial sequence
  synthetic peptide
LFTRAILQSGSFNAPWAVTSLYEARNRTLNLAKLTGCS

SEQ ID NO: 18860 - protein, 38 aa, Artificial sequence
  synthetic peptide
FTRAILQSGSFNAPWAVTSLYEARNRTLNLAKLTGCSR

SEQ ID NO: 18861 - protein, 38 aa, Artificial sequence
  synthetic peptide
TRAILQSGSFNAPWAVTSLYEARNRTLNLAKLTGCSRE

SEQ ID NO: 18862 - protein, 38 aa, Artificial sequence
  synthetic peptide
RAILQSGSFNAPWAVTSLYEARNRTLNLAKLTGCSREN

SEQ ID NO: 18863 - protein, 38 aa, Artificial sequence
  synthetic peptide
AILQSGSFNAPWAVTSLYEARNRTLNLAKLTGCSRENE

SEQ ID NO: 18864 - protein, 38 aa, Artificial sequence
  synthetic peptide
ILQSGSFNAPWAVTSLYEARNRTLNLAKLTGCSRENET

SEQ ID NO: 18865 - protein, 38 aa, Artificial sequence
  synthetic peptide
LQSGSFNAPWAVTSLYEARNRTLNLAKLTGCSRENETE

SEQ ID NO: 18866 - protein, 38 aa, Artificial sequence
  synthetic peptide
QSGSFNAPWAVTSLYEARNRTLNLAKLTGCSRENETEI

SEQ ID NO: 18867 - protein, 38 aa, Artificial sequence
  synthetic peptide
SGSFNAPWAVTSLYEARNRTLNLAKLTGCSRENETEII

SEQ ID NO: 18868 - protein, 38 aa, Artificial sequence
  synthetic peptide
GSFNAPWAVTSLYEARNRTLNLAKLTGCSRENETEIIK

SEQ ID NO: 18869 - protein, 38 aa, Artificial sequence
  synthetic peptide
SFNAPWAVTSLYEARNRTLNLAKLTGCSRENETEIIKC

SEQ ID NO: 18870 - protein, 38 aa, Artificial sequence
  synthetic peptide
FNAPWAVTSLYEARNRTLNLAKLTGCSRENETEIIKCL

SEQ ID NO: 18871 - protein, 38 aa, Artificial sequence
  synthetic peptide
NAPWAVTSLYEARNRTLNLAKLTGCSRENETEIIKCLR

SEQ ID NO: 18872 - protein, 38 aa, Artificial sequence
  synthetic peptide
APWAVTSLYEARNRTLNLAKLTGCSRENETEIIKCLRN

SEQ ID NO: 18873 - protein, 38 aa, Artificial sequence
  synthetic peptide
PWAVTSLYEARNRTLNLAKLTGCSRENETEIIKCLRNK

SEQ ID NO: 18874 - protein, 38 aa, Artificial sequence
  synthetic peptide
WAVTSLYEARNRTLNLAKLTGCSRENETEIIKCLRNKD

SEQ ID NO: 18875 - protein, 38 aa, Artificial sequence
  synthetic peptide
AVTSLYEARNRTLNLAKLTGCSRENETEIIKCLRNKDP

SEQ ID NO: 18876 - protein, 38 aa, Artificial sequence
  synthetic peptide
VTSLYEARNRTLNLAKLTGCSRENETEIIKCLRNKDPQ

SEQ ID NO: 18877 - protein, 38 aa, Artificial sequence
  synthetic peptide
TSLYEARNRTLNLAKLTGCSRENETEIIKCLRNKDPQE

SEQ ID NO: 18878 - protein, 38 aa, Artificial sequence
  synthetic peptide
SLYEARNRTLNLAKLTGCSRENETEIIKCLRNKDPQEI

SEQ ID NO: 18879 - protein, 38 aa, Artificial sequence
  synthetic peptide
LYEARNRTLNLAKLTGCSRENETEIIKCLRNKDPQEIL

SEQ ID NO: 18880 - protein, 38 aa, Artificial sequence
  synthetic peptide
YEARNRTLNLAKLTGCSRENETEIIKCLRNKDPQEILL

SEQ ID NO: 18881 - protein, 38 aa, Artificial sequence
  synthetic peptide
EARNRTLNLAKLTGCSRENETEIIKCLRNKDPQEILLN

SEQ ID NO: 18882 - protein, 38 aa, Artificial sequence
  synthetic peptide
ARNRTLNLAKLTGCSRENETEIIKCLRNKDPQEILLNE

SEQ ID NO: 18883 - protein, 38 aa, Artificial sequence
  synthetic peptide
RNRTLNLAKLTGCSRENETEIIKCLRNKDPQEILLNEA

SEQ ID NO: 18884 - protein, 38 aa, Artificial sequence
  synthetic peptide
NRTLNLAKLTGCSRENETEIIKCLRNKDPQEILLNEAF

SEQ ID NO: 18885 - protein, 38 aa, Artificial sequence
  synthetic peptide
RTLNLAKLTGCSRENETEIIKCLRNKDPQEILLNEAFV

SEQ ID NO: 18886 - protein, 38 aa, Artificial sequence
  synthetic peptide
TLNLAKLTGCSRENETEIIKCLRNKDPQEILLNEAFVV

SEQ ID NO: 18887 - protein, 38 aa, Artificial sequence
  synthetic peptide
LNLAKLTGCSRENETEIIKCLRNKDPQEILLNEAFVVP

SEQ ID NO: 18888 - protein, 38 aa, Artificial sequence
  synthetic peptide
NLAKLTGCSRENETEIIKCLRNKDPQEILLNEAFVVPY

SEQ ID NO: 18889 - protein, 38 aa, Artificial sequence
  synthetic peptide
LAKLTGCSRENETEIIKCLRNKDPQEILLNEAFVVPYG

SEQ ID NO: 18890 - protein, 38 aa, Artificial sequence
  synthetic peptide
AKLTGCSRENETEIIKCLRNKDPQEILLNEAFVVPYGT

SEQ ID NO: 18891 - protein, 38 aa, Artificial sequence
  synthetic peptide
KLTGCSRENETEIIKCLRNKDPQEILLNEAFVVPYGTP

SEQ ID NO: 18892 - protein, 38 aa, Artificial sequence
  synthetic peptide
LTGCSRENETEIIKCLRNKDPQEILLNEAFVVPYGTPL

SEQ ID NO: 18893 - protein, 38 aa, Artificial sequence
  synthetic peptide
TGCSRENETEIIKCLRNKDPQEILLNEAFVVPYGTPLS

SEQ ID NO: 18894 - protein, 38 aa, Artificial sequence
  synthetic peptide
GCSRENETEIIKCLRNKDPQEILLNEAFVVPYGTPLSV

SEQ ID NO: 18895 - protein, 38 aa, Artificial sequence
  synthetic peptide
CSRENETEIIKCLRNKDPQEILLNEAFVVPYGTPLSVN

SEQ ID NO: 18896 - protein, 38 aa, Artificial sequence
  synthetic peptide
SRENETEIIKCLRNKDPQEILLNEAFVVPYGTPLSVNF

SEQ ID NO: 18897 - protein, 38 aa, Artificial sequence
  synthetic peptide
RENETEIIKCLRNKDPQEILLNEAFVVPYGTPLSVNFG

SEQ ID NO: 18898 - protein, 38 aa, Artificial sequence
  synthetic peptide
ENETEIIKCLRNKDPQEILLNEAFVVPYGTPLSVNFGP

SEQ ID NO: 18899 - protein, 38 aa, Artificial sequence
  synthetic peptide
NETEIIKCLRNKDPQEILLNEAFVVPYGTPLSVNFGPT

SEQ ID NO: 18900 - protein, 38 aa, Artificial sequence
  synthetic peptide
ETEIIKCLRNKDPQEILLNEAFVVPYGTPLSVNFGPTV

SEQ ID NO: 18901 - protein, 38 aa, Artificial sequence
  synthetic peptide
TEIIKCLRNKDPQEILLNEAFVVPYGTPLSVNFGPTVD

SEQ ID NO: 18902 - protein, 38 aa, Artificial sequence
  synthetic peptide
EIIKCLRNKDPQEILLNEAFVVPYGTPLSVNFGPTVDG

SEQ ID NO: 18903 - protein, 38 aa, Artificial sequence
  synthetic peptide
IIKCLRNKDPQEILLNEAFVVPYGTPLSVNFGPTVDGD

SEQ ID NO: 18904 - protein, 38 aa, Artificial sequence
  synthetic peptide
IKCLRNKDPQEILLNEAFVVPYGTPLSVNFGPTVDGDF

SEQ ID NO: 18905 - protein, 38 aa, Artificial sequence
  synthetic peptide
KCLRNKDPQEILLNEAFVVPYGTPLSVNFGPTVDGDFL

SEQ ID NO: 18906 - protein, 38 aa, Artificial sequence
  synthetic peptide
CLRNKDPQEILLNEAFVVPYGTPLSVNFGPTVDGDFLT

SEQ ID NO: 18907 - protein, 38 aa, Artificial sequence
  synthetic peptide
LRNKDPQEILLNEAFVVPYGTPLSVNFGPTVDGDFLTD

SEQ ID NO: 18908 - protein, 38 aa, Artificial sequence
  synthetic peptide
RNKDPQEILLNEAFVVPYGTPLSVNFGPTVDGDFLTDM

SEQ ID NO: 18909 - protein, 38 aa, Artificial sequence
  synthetic peptide
NKDPQEILLNEAFVVPYGTPLSVNFGPTVDGDFLTDMP

SEQ ID NO: 18910 - protein, 38 aa, Artificial sequence
  synthetic peptide
KDPQEILLNEAFVVPYGTPLSVNFGPTVDGDFLTDMPD

SEQ ID NO: 18911 - protein, 38 aa, Artificial sequence
  synthetic peptide
DPQEILLNEAFVVPYGTPLSVNFGPTVDGDFLTDMPDI

SEQ ID NO: 18912 - protein, 38 aa, Artificial sequence
  synthetic peptide
PQEILLNEAFVVPYGTPLSVNFGPTVDGDFLTDMPDIL

SEQ ID NO: 18913 - protein, 38 aa, Artificial sequence
  synthetic peptide
QEILLNEAFVVPYGTPLSVNFGPTVDGDFLTDMPDILL

SEQ ID NO: 18914 - protein, 38 aa, Artificial sequence
  synthetic peptide
EILLNEAFVVPYGTPLSVNFGPTVDGDFLTDMPDILLE

SEQ ID NO: 18915 - protein, 38 aa, Artificial sequence
  synthetic peptide
ILLNEAFVVPYGTPLSVNFGPTVDGDFLTDMPDILLEL

SEQ ID NO: 18916 - protein, 38 aa, Artificial sequence
  synthetic peptide
LLNEAFVVPYGTPLSVNFGPTVDGDFLTDMPDILLELG

SEQ ID NO: 18917 - protein, 38 aa, Artificial sequence
  synthetic peptide
LNEAFVVPYGTPLSVNFGPTVDGDFLTDMPDILLELGQ

SEQ ID NO: 18918 - protein, 38 aa, Artificial sequence
  synthetic peptide
NEAFVVPYGTPLSVNFGPTVDGDFLTDMPDILLELGQF

SEQ ID NO: 18919 - protein, 38 aa, Artificial sequence
  synthetic peptide
EAFVVPYGTPLSVNFGPTVDGDFLTDMPDILLELGQFK

SEQ ID NO: 18920 - protein, 38 aa, Artificial sequence
  synthetic peptide
AFVVPYGTPLSVNFGPTVDGDFLTDMPDILLELGQFKK

SEQ ID NO: 18921 - protein, 38 aa, Artificial sequence
  synthetic peptide
FVVPYGTPLSVNFGPTVDGDFLTDMPDILLELGQFKKT

SEQ ID NO: 18922 - protein, 38 aa, Artificial sequence
  synthetic peptide
VVPYGTPLSVNFGPTVDGDFLTDMPDILLELGQFKKTQ

SEQ ID NO: 18923 - protein, 38 aa, Artificial sequence
  synthetic peptide
VPYGTPLSVNFGPTVDGDFLTDMPDILLELGQFKKTQI

SEQ ID NO: 18924 - protein, 38 aa, Artificial sequence
  synthetic peptide
PYGTPLSVNFGPTVDGDFLTDMPDILLELGQFKKTQIL

SEQ ID NO: 18925 - protein, 38 aa, Artificial sequence
  synthetic peptide
YGTPLSVNFGPTVDGDFLTDMPDILLELGQFKKTQILV

SEQ ID NO: 18926 - protein, 38 aa, Artificial sequence
  synthetic peptide
GTPLSVNFGPTVDGDFLTDMPDILLELGQFKKTQILVG

SEQ ID NO: 18927 - protein, 38 aa, Artificial sequence
  synthetic peptide
TPLSVNFGPTVDGDFLTDMPDILLELGQFKKTQILVGV

SEQ ID NO: 18928 - protein, 38 aa, Artificial sequence
  synthetic peptide
PLSVNFGPTVDGDFLTDMPDILLELGQFKKTQILVGVN

SEQ ID NO: 18929 - protein, 38 aa, Artificial sequence
  synthetic peptide
LSVNFGPTVDGDFLTDMPDILLELGQFKKTQILVGVNK

SEQ ID NO: 18930 - protein, 38 aa, Artificial sequence
  synthetic peptide
SVNFGPTVDGDFLTDMPDILLELGQFKKTQILVGVNKD

SEQ ID NO: 18931 - protein, 38 aa, Artificial sequence
  synthetic peptide
VNFGPTVDGDFLTDMPDILLELGQFKKTQILVGVNKDE

SEQ ID NO: 18932 - protein, 38 aa, Artificial sequence
  synthetic peptide
NFGPTVDGDFLTDMPDILLELGQFKKTQILVGVNKDEG

SEQ ID NO: 18933 - protein, 38 aa, Artificial sequence
  synthetic peptide
FGPTVDGDFLTDMPDILLELGQFKKTQILVGVNKDEGT

SEQ ID NO: 18934 - protein, 38 aa, Artificial sequence
  synthetic peptide
GPTVDGDFLTDMPDILLELGQFKKTQILVGVNKDEGTA

SEQ ID NO: 18935 - protein, 38 aa, Artificial sequence
  synthetic peptide
PTVDGDFLTDMPDILLELGQFKKTQILVGVNKDEGTAF

SEQ ID NO: 18936 - protein, 38 aa, Artificial sequence
  synthetic peptide
TVDGDFLTDMPDILLELGQFKKTQILVGVNKDEGTAFL

SEQ ID NO: 18937 - protein, 38 aa, Artificial sequence
  synthetic peptide
VDGDFLTDMPDILLELGQFKKTQILVGVNKDEGTAFLV

SEQ ID NO: 18938 - protein, 38 aa, Artificial sequence
  synthetic peptide
DGDFLTDMPDILLELGQFKKTQILVGVNKDEGTAFLVY

SEQ ID NO: 18939 - protein, 38 aa, Artificial sequence
  synthetic peptide
GDFLTDMPDILLELGQFKKTQILVGVNKDEGTAFLVYG

SEQ ID NO: 18940 - protein, 38 aa, Artificial sequence
  synthetic peptide
DFLTDMPDILLELGQFKKTQILVGVNKDEGTAFLVYGA

SEQ ID NO: 18941 - protein, 38 aa, Artificial sequence
  synthetic peptide
FLTDMPDILLELGQFKKTQILVGVNKDEGTAFLVYGAP

SEQ ID NO: 18942 - protein, 38 aa, Artificial sequence
  synthetic peptide
LTDMPDILLELGQFKKTQILVGVNKDEGTAFLVYGAPG

SEQ ID NO: 18943 - protein, 38 aa, Artificial sequence
  synthetic peptide
TDMPDILLELGQFKKTQILVGVNKDEGTAFLVYGAPGF

SEQ ID NO: 18944 - protein, 38 aa, Artificial sequence
  synthetic peptide
DMPDILLELGQFKKTQILVGVNKDEGTAFLVYGAPGFS

SEQ ID NO: 18945 - protein, 38 aa, Artificial sequence
  synthetic peptide
MPDILLELGQFKKTQILVGVNKDEGTAFLVYGAPGFSK

SEQ ID NO: 18946 - protein, 38 aa, Artificial sequence
  synthetic peptide
PDILLELGQFKKTQILVGVNKDEGTAFLVYGAPGFSKD

SEQ ID NO: 18947 - protein, 38 aa, Artificial sequence
  synthetic peptide
DILLELGQFKKTQILVGVNKDEGTAFLVYGAPGFSKDN

SEQ ID NO: 18948 - protein, 38 aa, Artificial sequence
  synthetic peptide
ILLELGQFKKTQILVGVNKDEGTAFLVYGAPGFSKDNN

SEQ ID NO: 18949 - protein, 38 aa, Artificial sequence
  synthetic peptide
LLELGQFKKTQILVGVNKDEGTAFLVYGAPGFSKDNNS

SEQ ID NO: 18950 - protein, 38 aa, Artificial sequence
  synthetic peptide
LELGQFKKTQILVGVNKDEGTAFLVYGAPGFSKDNNSI

SEQ ID NO: 18951 - protein, 38 aa, Artificial sequence
  synthetic peptide
ELGQFKKTQILVGVNKDEGTAFLVYGAPGFSKDNNSII

SEQ ID NO: 18952 - protein, 38 aa, Artificial sequence
  synthetic peptide
LGQFKKTQILVGVNKDEGTAFLVYGAPGFSKDNNSIIT

SEQ ID NO: 18953 - protein, 38 aa, Artificial sequence
  synthetic peptide
GQFKKTQILVGVNKDEGTAFLVYGAPGFSKDNNSIITR

SEQ ID NO: 18954 - protein, 38 aa, Artificial sequence
  synthetic peptide
QFKKTQILVGVNKDEGTAFLVYGAPGFSKDNNSIITRK

SEQ ID NO: 18955 - protein, 38 aa, Artificial sequence
  synthetic peptide
FKKTQILVGVNKDEGTAFLVYGAPGFSKDNNSIITRKE

SEQ ID NO: 18956 - protein, 38 aa, Artificial sequence
  synthetic peptide
KKTQILVGVNKDEGTAFLVYGAPGFSKDNNSIITRKEF

SEQ ID NO: 18957 - protein, 38 aa, Artificial sequence
  synthetic peptide
KTQILVGVNKDEGTAFLVYGAPGFSKDNNSIITRKEFQ

SEQ ID NO: 18958 - protein, 38 aa, Artificial sequence
  synthetic peptide
TQILVGVNKDEGTAFLVYGAPGFSKDNNSIITRKEFQE

SEQ ID NO: 18959 - protein, 38 aa, Artificial sequence
  synthetic peptide
QILVGVNKDEGTAFLVYGAPGFSKDNNSIITRKEFQEG

SEQ ID NO: 18960 - protein, 38 aa, Artificial sequence
  synthetic peptide
ILVGVNKDEGTAFLVYGAPGFSKDNNSIITRKEFQEGL

SEQ ID NO: 18961 - protein, 38 aa, Artificial sequence
  synthetic peptide
LVGVNKDEGTAFLVYGAPGFSKDNNSIITRKEFQEGLK

SEQ ID NO: 18962 - protein, 38 aa, Artificial sequence
  synthetic peptide
VGVNKDEGTAFLVYGAPGFSKDNNSIITRKEFQEGLKI

SEQ ID NO: 18963 - protein, 38 aa, Artificial sequence
  synthetic peptide
GVNKDEGTAFLVYGAPGFSKDNNSIITRKEFQEGLKIF

SEQ ID NO: 18964 - protein, 38 aa, Artificial sequence
  synthetic peptide
VNKDEGTAFLVYGAPGFSKDNNSIITRKEFQEGLKIFF

SEQ ID NO: 18965 - protein, 38 aa, Artificial sequence
  synthetic peptide
NKDEGTAFLVYGAPGFSKDNNSIITRKEFQEGLKIFFP

SEQ ID NO: 18966 - protein, 38 aa, Artificial sequence
  synthetic peptide
KDEGTAFLVYGAPGFSKDNNSIITRKEFQEGLKIFFPG

SEQ ID NO: 18967 - protein, 38 aa, Artificial sequence
  synthetic peptide
DEGTAFLVYGAPGFSKDNNSIITRKEFQEGLKIFFPGV

SEQ ID NO: 18968 - protein, 38 aa, Artificial sequence
  synthetic peptide
EGTAFLVYGAPGFSKDNNSIITRKEFQEGLKIFFPGVS

SEQ ID NO: 18969 - protein, 38 aa, Artificial sequence
  synthetic peptide
GTAFLVYGAPGFSKDNNSIITRKEFQEGLKIFFPGVSE

SEQ ID NO: 18970 - protein, 38 aa, Artificial sequence
  synthetic peptide
TAFLVYGAPGFSKDNNSIITRKEFQEGLKIFFPGVSEF

SEQ ID NO: 18971 - protein, 38 aa, Artificial sequence
  synthetic peptide
AFLVYGAPGFSKDNNSIITRKEFQEGLKIFFPGVSEFG

SEQ ID NO: 18972 - protein, 38 aa, Artificial sequence
  synthetic peptide
FLVYGAPGFSKDNNSIITRKEFQEGLKIFFPGVSEFGK

SEQ ID NO: 18973 - protein, 38 aa, Artificial sequence
  synthetic peptide
LVYGAPGFSKDNNSIITRKEFQEGLKIFFPGVSEFGKE

SEQ ID NO: 18974 - protein, 38 aa, Artificial sequence
  synthetic peptide
VYGAPGFSKDNNSIITRKEFQEGLKIFFPGVSEFGKES

SEQ ID NO: 18975 - protein, 38 aa, Artificial sequence
  synthetic peptide
YGAPGFSKDNNSIITRKEFQEGLKIFFPGVSEFGKESI

SEQ ID NO: 18976 - protein, 38 aa, Artificial sequence
  synthetic peptide
GAPGFSKDNNSIITRKEFQEGLKIFFPGVSEFGKESIL

SEQ ID NO: 18977 - protein, 38 aa, Artificial sequence
  synthetic peptide
APGFSKDNNSIITRKEFQEGLKIFFPGVSEFGKESILF

SEQ ID NO: 18978 - protein, 38 aa, Artificial sequence
  synthetic peptide
PGFSKDNNSIITRKEFQEGLKIFFPGVSEFGKESILFH

SEQ ID NO: 18979 - protein, 38 aa, Artificial sequence
  synthetic peptide
GFSKDNNSIITRKEFQEGLKIFFPGVSEFGKESILFHY

SEQ ID NO: 18980 - protein, 38 aa, Artificial sequence
  synthetic peptide
FSKDNNSIITRKEFQEGLKIFFPGVSEFGKESILFHYT

SEQ ID NO: 18981 - protein, 38 aa, Artificial sequence
  synthetic peptide
SKDNNSIITRKEFQEGLKIFFPGVSEFGKESILFHYTD

SEQ ID NO: 18982 - protein, 38 aa, Artificial sequence
  synthetic peptide
KDNNSIITRKEFQEGLKIFFPGVSEFGKESILFHYTDW

SEQ ID NO: 18983 - protein, 38 aa, Artificial sequence
  synthetic peptide
DNNSIITRKEFQEGLKIFFPGVSEFGKESILFHYTDWV

SEQ ID NO: 18984 - protein, 38 aa, Artificial sequence
  synthetic peptide
NNSIITRKEFQEGLKIFFPGVSEFGKESILFHYTDWVD

SEQ ID NO: 18985 - protein, 38 aa, Artificial sequence
  synthetic peptide
NSIITRKEFQEGLKIFFPGVSEFGKESILFHYTDWVDD

SEQ ID NO: 18986 - protein, 38 aa, Artificial sequence
  synthetic peptide
SIITRKEFQEGLKIFFPGVSEFGKESILFHYTDWVDDQ

SEQ ID NO: 18987 - protein, 38 aa, Artificial sequence
  synthetic peptide
IITRKEFQEGLKIFFPGVSEFGKESILFHYTDWVDDQR

SEQ ID NO: 18988 - protein, 38 aa, Artificial sequence
  synthetic peptide
ITRKEFQEGLKIFFPGVSEFGKESILFHYTDWVDDQRP

SEQ ID NO: 18989 - protein, 38 aa, Artificial sequence
  synthetic peptide
TRKEFQEGLKIFFPGVSEFGKESILFHYTDWVDDQRPE

SEQ ID NO: 18990 - protein, 38 aa, Artificial sequence
  synthetic peptide
RKEFQEGLKIFFPGVSEFGKESILFHYTDWVDDQRPEN

SEQ ID NO: 18991 - protein, 38 aa, Artificial sequence
  synthetic peptide
KEFQEGLKIFFPGVSEFGKESILFHYTDWVDDQRPENY

SEQ ID NO: 18992 - protein, 38 aa, Artificial sequence
  synthetic peptide
EFQEGLKIFFPGVSEFGKESILFHYTDWVDDQRPENYR

SEQ ID NO: 18993 - protein, 38 aa, Artificial sequence
  synthetic peptide
FQEGLKIFFPGVSEFGKESILFHYTDWVDDQRPENYRE

SEQ ID NO: 18994 - protein, 38 aa, Artificial sequence
  synthetic peptide
QEGLKIFFPGVSEFGKESILFHYTDWVDDQRPENYREA

SEQ ID NO: 18995 - protein, 38 aa, Artificial sequence
  synthetic peptide
EGLKIFFPGVSEFGKESILFHYTDWVDDQRPENYREAL

SEQ ID NO: 18996 - protein, 38 aa, Artificial sequence
  synthetic peptide
GLKIFFPGVSEFGKESILFHYTDWVDDQRPENYREALG

SEQ ID NO: 18997 - protein, 38 aa, Artificial sequence
  synthetic peptide
LKIFFPGVSEFGKESILFHYTDWVDDQRPENYREALGD

SEQ ID NO: 18998 - protein, 38 aa, Artificial sequence
  synthetic peptide
KIFFPGVSEFGKESILFHYTDWVDDQRPENYREALGDV

SEQ ID NO: 18999 - protein, 38 aa, Artificial sequence
  synthetic peptide
IFFPGVSEFGKESILFHYTDWVDDQRPENYREALGDVV

SEQ ID NO: 19000 - protein, 38 aa, Artificial sequence
  synthetic peptide
FFPGVSEFGKESILFHYTDWVDDQRPENYREALGDVVG

SEQ ID NO: 19001 - protein, 38 aa, Artificial sequence
  synthetic peptide
FPGVSEFGKESILFHYTDWVDDQRPENYREALGDVVGD

SEQ ID NO: 19002 - protein, 38 aa, Artificial sequence
  synthetic peptide
PGVSEFGKESILFHYTDWVDDQRPENYREALGDVVGDY

SEQ ID NO: 19003 - protein, 38 aa, Artificial sequence
  synthetic peptide
GVSEFGKESILFHYTDWVDDQRPENYREALGDVVGDYN

SEQ ID NO: 19004 - protein, 38 aa, Artificial sequence
  synthetic peptide
VSEFGKESILFHYTDWVDDQRPENYREALGDVVGDYNF

SEQ ID NO: 19005 - protein, 38 aa, Artificial sequence
  synthetic peptide
SEFGKESILFHYTDWVDDQRPENYREALGDVVGDYNFI

SEQ ID NO: 19006 - protein, 38 aa, Artificial sequence
  synthetic peptide
EFGKESILFHYTDWVDDQRPENYREALGDVVGDYNFIC

SEQ ID NO: 19007 - protein, 38 aa, Artificial sequence
  synthetic peptide
FGKESILFHYTDWVDDQRPENYREALGDVVGDYNFICP

SEQ ID NO: 19008 - protein, 38 aa, Artificial sequence
  synthetic peptide
GKESILFHYTDWVDDQRPENYREALGDVVGDYNFICPA

SEQ ID NO: 19009 - protein, 38 aa, Artificial sequence
  synthetic peptide
KESILFHYTDWVDDQRPENYREALGDVVGDYNFICPAL

SEQ ID NO: 19010 - protein, 38 aa, Artificial sequence
  synthetic peptide
ESILFHYTDWVDDQRPENYREALGDVVGDYNFICPALE

SEQ ID NO: 19011 - protein, 38 aa, Artificial sequence
  synthetic peptide
SILFHYTDWVDDQRPENYREALGDVVGDYNFICPALEF

SEQ ID NO: 19012 - protein, 38 aa, Artificial sequence
  synthetic peptide
ILFHYTDWVDDQRPENYREALGDVVGDYNFICPALEFT

SEQ ID NO: 19013 - protein, 38 aa, Artificial sequence
  synthetic peptide
LFHYTDWVDDQRPENYREALGDVVGDYNFICPALEFTK

SEQ ID NO: 19014 - protein, 38 aa, Artificial sequence
  synthetic peptide
FHYTDWVDDQRPENYREALGDVVGDYNFICPALEFTKK

SEQ ID NO: 19015 - protein, 38 aa, Artificial sequence
  synthetic peptide
HYTDWVDDQRPENYREALGDVVGDYNFICPALEFTKKF

SEQ ID NO: 19016 - protein, 38 aa, Artificial sequence
  synthetic peptide
YTDWVDDQRPENYREALGDVVGDYNFICPALEFTKKFS

SEQ ID NO: 19017 - protein, 38 aa, Artificial sequence
  synthetic peptide
TDWVDDQRPENYREALGDVVGDYNFICPALEFTKKFSE

SEQ ID NO: 19018 - protein, 38 aa, Artificial sequence
  synthetic peptide
DWVDDQRPENYREALGDVVGDYNFICPALEFTKKFSEW

SEQ ID NO: 19019 - protein, 38 aa, Artificial sequence
  synthetic peptide
WVDDQRPENYREALGDVVGDYNFICPALEFTKKFSEWG

SEQ ID NO: 19020 - protein, 38 aa, Artificial sequence
  synthetic peptide
VDDQRPENYREALGDVVGDYNFICPALEFTKKFSEWGN

SEQ ID NO: 19021 - protein, 38 aa, Artificial sequence
  synthetic peptide
DDQRPENYREALGDVVGDYNFICPALEFTKKFSEWGNN

SEQ ID NO: 19022 - protein, 38 aa, Artificial sequence
  synthetic peptide
DQRPENYREALGDVVGDYNFICPALEFTKKFSEWGNNA

SEQ ID NO: 19023 - protein, 38 aa, Artificial sequence
  synthetic peptide
QRPENYREALGDVVGDYNFICPALEFTKKFSEWGNNAF

SEQ ID NO: 19024 - protein, 38 aa, Artificial sequence
  synthetic peptide
RPENYREALGDVVGDYNFICPALEFTKKFSEWGNNAFF

SEQ ID NO: 19025 - protein, 38 aa, Artificial sequence
  synthetic peptide
PENYREALGDVVGDYNFICPALEFTKKFSEWGNNAFFY

SEQ ID NO: 19026 - protein, 38 aa, Artificial sequence
  synthetic peptide
ENYREALGDVVGDYNFICPALEFTKKFSEWGNNAFFYY

SEQ ID NO: 19027 - protein, 38 aa, Artificial sequence
  synthetic peptide
NYREALGDVVGDYNFICPALEFTKKFSEWGNNAFFYYF

SEQ ID NO: 19028 - protein, 38 aa, Artificial sequence
  synthetic peptide
YREALGDVVGDYNFICPALEFTKKFSEWGNNAFFYYFE

SEQ ID NO: 19029 - protein, 38 aa, Artificial sequence
  synthetic peptide
REALGDVVGDYNFICPALEFTKKFSEWGNNAFFYYFEH

SEQ ID NO: 19030 - protein, 38 aa, Artificial sequence
  synthetic peptide
EALGDVVGDYNFICPALEFTKKFSEWGNNAFFYYFEHR

SEQ ID NO: 19031 - protein, 38 aa, Artificial sequence
  synthetic peptide
ALGDVVGDYNFICPALEFTKKFSEWGNNAFFYYFEHRS

SEQ ID NO: 19032 - protein, 38 aa, Artificial sequence
  synthetic peptide
LGDVVGDYNFICPALEFTKKFSEWGNNAFFYYFEHRSS

SEQ ID NO: 19033 - protein, 38 aa, Artificial sequence
  synthetic peptide
GDVVGDYNFICPALEFTKKFSEWGNNAFFYYFEHRSSK

SEQ ID NO: 19034 - protein, 38 aa, Artificial sequence
  synthetic peptide
DVVGDYNFICPALEFTKKFSEWGNNAFFYYFEHRSSKL

SEQ ID NO: 19035 - protein, 38 aa, Artificial sequence
  synthetic peptide
VVGDYNFICPALEFTKKFSEWGNNAFFYYFEHRSSKLP

SEQ ID NO: 19036 - protein, 38 aa, Artificial sequence
  synthetic peptide
VGDYNFICPALEFTKKFSEWGNNAFFYYFEHRSSKLPW

SEQ ID NO: 19037 - protein, 38 aa, Artificial sequence
  synthetic peptide
GDYNFICPALEFTKKFSEWGNNAFFYYFEHRSSKLPWP

SEQ ID NO: 19038 - protein, 38 aa, Artificial sequence
  synthetic peptide
DYNFICPALEFTKKFSEWGNNAFFYYFEHRSSKLPWPE

SEQ ID NO: 19039 - protein, 38 aa, Artificial sequence
  synthetic peptide
YNFICPALEFTKKFSEWGNNAFFYYFEHRSSKLPWPEW

SEQ ID NO: 19040 - protein, 38 aa, Artificial sequence
  synthetic peptide
NFICPALEFTKKFSEWGNNAFFYYFEHRSSKLPWPEWM

SEQ ID NO: 19041 - protein, 38 aa, Artificial sequence
  synthetic peptide
FICPALEFTKKFSEWGNNAFFYYFEHRSSKLPWPEWMG

SEQ ID NO: 19042 - protein, 38 aa, Artificial sequence
  synthetic peptide
ICPALEFTKKFSEWGNNAFFYYFEHRSSKLPWPEWMGV

SEQ ID NO: 19043 - protein, 38 aa, Artificial sequence
  synthetic peptide
CPALEFTKKFSEWGNNAFFYYFEHRSSKLPWPEWMGVM

SEQ ID NO: 19044 - protein, 38 aa, Artificial sequence
  synthetic peptide
PALEFTKKFSEWGNNAFFYYFEHRSSKLPWPEWMGVMH

SEQ ID NO: 19045 - protein, 38 aa, Artificial sequence
  synthetic peptide
ALEFTKKFSEWGNNAFFYYFEHRSSKLPWPEWMGVMHG

SEQ ID NO: 19046 - protein, 38 aa, Artificial sequence
  synthetic peptide
LEFTKKFSEWGNNAFFYYFEHRSSKLPWPEWMGVMHGY

SEQ ID NO: 19047 - protein, 38 aa, Artificial sequence
  synthetic peptide
EFTKKFSEWGNNAFFYYFEHRSSKLPWPEWMGVMHGYE

SEQ ID NO: 19048 - protein, 38 aa, Artificial sequence
  synthetic peptide
FTKKFSEWGNNAFFYYFEHRSSKLPWPEWMGVMHGYEI

SEQ ID NO: 19049 - protein, 38 aa, Artificial sequence
  synthetic peptide
TKKFSEWGNNAFFYYFEHRSSKLPWPEWMGVMHGYEIE

SEQ ID NO: 19050 - protein, 38 aa, Artificial sequence
  synthetic peptide
KKFSEWGNNAFFYYFEHRSSKLPWPEWMGVMHGYEIEF

SEQ ID NO: 19051 - protein, 38 aa, Artificial sequence
  synthetic peptide
KFSEWGNNAFFYYFEHRSSKLPWPEWMGVMHGYEIEFV

SEQ ID NO: 19052 - protein, 38 aa, Artificial sequence
  synthetic peptide
FSEWGNNAFFYYFEHRSSKLPWPEWMGVMHGYEIEFVF

SEQ ID NO: 19053 - protein, 38 aa, Artificial sequence
  synthetic peptide
SEWGNNAFFYYFEHRSSKLPWPEWMGVMHGYEIEFVFG

SEQ ID NO: 19054 - protein, 38 aa, Artificial sequence
  synthetic peptide
EWGNNAFFYYFEHRSSKLPWPEWMGVMHGYEIEFVFGL

SEQ ID NO: 19055 - protein, 38 aa, Artificial sequence
  synthetic peptide
WGNNAFFYYFEHRSSKLPWPEWMGVMHGYEIEFVFGLP

SEQ ID NO: 19056 - protein, 38 aa, Artificial sequence
  synthetic peptide
GNNAFFYYFEHRSSKLPWPEWMGVMHGYEIEFVFGLPL

SEQ ID NO: 19057 - protein, 38 aa, Artificial sequence
  synthetic peptide
NNAFFYYFEHRSSKLPWPEWMGVMHGYEIEFVFGLPLE

SEQ ID NO: 19058 - protein, 38 aa, Artificial sequence
  synthetic peptide
NAFFYYFEHRSSKLPWPEWMGVMHGYEIEFVFGLPLER

SEQ ID NO: 19059 - protein, 38 aa, Artificial sequence
  synthetic peptide
AFFYYFEHRSSKLPWPEWMGVMHGYEIEFVFGLPLERR

SEQ ID NO: 19060 - protein, 38 aa, Artificial sequence
  synthetic peptide
FFYYFEHRSSKLPWPEWMGVMHGYEIEFVFGLPLERRD

SEQ ID NO: 19061 - protein, 38 aa, Artificial sequence
  synthetic peptide
FYYFEHRSSKLPWPEWMGVMHGYEIEFVFGLPLERRDN

SEQ ID NO: 19062 - protein, 38 aa, Artificial sequence
  synthetic peptide
YYFEHRSSKLPWPEWMGVMHGYEIEFVFGLPLERRDNY

SEQ ID NO: 19063 - protein, 38 aa, Artificial sequence
  synthetic peptide
YFEHRSSKLPWPEWMGVMHGYEIEFVFGLPLERRDNYT

SEQ ID NO: 19064 - protein, 38 aa, Artificial sequence
  synthetic peptide
FEHRSSKLPWPEWMGVMHGYEIEFVFGLPLERRDNYTK

SEQ ID NO: 19065 - protein, 38 aa, Artificial sequence
  synthetic peptide
EHRSSKLPWPEWMGVMHGYEIEFVFGLPLERRDNYTKA

SEQ ID NO: 19066 - protein, 38 aa, Artificial sequence
  synthetic peptide
HRSSKLPWPEWMGVMHGYEIEFVFGLPLERRDNYTKAE

SEQ ID NO: 19067 - protein, 38 aa, Artificial sequence
  synthetic peptide
RSSKLPWPEWMGVMHGYEIEFVFGLPLERRDNYTKAEE

SEQ ID NO: 19068 - protein, 38 aa, Artificial sequence
  synthetic peptide
SSKLPWPEWMGVMHGYEIEFVFGLPLERRDNYTKAEEI

SEQ ID NO: 19069 - protein, 38 aa, Artificial sequence
  synthetic peptide
SKLPWPEWMGVMHGYEIEFVFGLPLERRDNYTKAEEIL

SEQ ID NO: 19070 - protein, 38 aa, Artificial sequence
  synthetic peptide
KLPWPEWMGVMHGYEIEFVFGLPLERRDNYTKAEEILS

SEQ ID NO: 19071 - protein, 38 aa, Artificial sequence
  synthetic peptide
LPWPEWMGVMHGYEIEFVFGLPLERRDNYTKAEEILSR

SEQ ID NO: 19072 - protein, 38 aa, Artificial sequence
  synthetic peptide
PWPEWMGVMHGYEIEFVFGLPLERRDNYTKAEEILSRS

SEQ ID NO: 19073 - protein, 38 aa, Artificial sequence
  synthetic peptide
WPEWMGVMHGYEIEFVFGLPLERRDNYTKAEEILSRSI

SEQ ID NO: 19074 - protein, 38 aa, Artificial sequence
  synthetic peptide
PEWMGVMHGYEIEFVFGLPLERRDNYTKAEEILSRSIV

SEQ ID NO: 19075 - protein, 38 aa, Artificial sequence
  synthetic peptide
EWMGVMHGYEIEFVFGLPLERRDNYTKAEEILSRSIVK

SEQ ID NO: 19076 - protein, 38 aa, Artificial sequence
  synthetic peptide
WMGVMHGYEIEFVFGLPLERRDNYTKAEEILSRSIVKR

SEQ ID NO: 19077 - protein, 38 aa, Artificial sequence
  synthetic peptide
MGVMHGYEIEFVFGLPLERRDNYTKAEEILSRSIVKRW

SEQ ID NO: 19078 - protein, 38 aa, Artificial sequence
  synthetic peptide
GVMHGYEIEFVFGLPLERRDNYTKAEEILSRSIVKRWA

SEQ ID NO: 19079 - protein, 38 aa, Artificial sequence
  synthetic peptide
VMHGYEIEFVFGLPLERRDNYTKAEEILSRSIVKRWAN

SEQ ID NO: 19080 - protein, 38 aa, Artificial sequence
  synthetic peptide
MHGYEIEFVFGLPLERRDNYTKAEEILSRSIVKRWANF

SEQ ID NO: 19081 - protein, 38 aa, Artificial sequence
  synthetic peptide
HGYEIEFVFGLPLERRDNYTKAEEILSRSIVKRWANFA

SEQ ID NO: 19082 - protein, 38 aa, Artificial sequence
  synthetic peptide
GYEIEFVFGLPLERRDNYTKAEEILSRSIVKRWANFAK

SEQ ID NO: 19083 - protein, 38 aa, Artificial sequence
  synthetic peptide
YEIEFVFGLPLERRDNYTKAEEILSRSIVKRWANFAKY

SEQ ID NO: 19084 - protein, 38 aa, Artificial sequence
  synthetic peptide
EIEFVFGLPLERRDNYTKAEEILSRSIVKRWANFAKYG

SEQ ID NO: 19085 - protein, 38 aa, Artificial sequence
  synthetic peptide
IEFVFGLPLERRDNYTKAEEILSRSIVKRWANFAKYGN

SEQ ID NO: 19086 - protein, 38 aa, Artificial sequence
  synthetic peptide
EFVFGLPLERRDNYTKAEEILSRSIVKRWANFAKYGNP

SEQ ID NO: 19087 - protein, 38 aa, Artificial sequence
  synthetic peptide
FVFGLPLERRDNYTKAEEILSRSIVKRWANFAKYGNPN

SEQ ID NO: 19088 - protein, 38 aa, Artificial sequence
  synthetic peptide
VFGLPLERRDNYTKAEEILSRSIVKRWANFAKYGNPNE

SEQ ID NO: 19089 - protein, 38 aa, Artificial sequence
  synthetic peptide
FGLPLERRDNYTKAEEILSRSIVKRWANFAKYGNPNET

SEQ ID NO: 19090 - protein, 38 aa, Artificial sequence
  synthetic peptide
GLPLERRDNYTKAEEILSRSIVKRWANFAKYGNPNETQ

SEQ ID NO: 19091 - protein, 38 aa, Artificial sequence
  synthetic peptide
LPLERRDNYTKAEEILSRSIVKRWANFAKYGNPNETQN

SEQ ID NO: 19092 - protein, 38 aa, Artificial sequence
  synthetic peptide
PLERRDNYTKAEEILSRSIVKRWANFAKYGNPNETQNN

SEQ ID NO: 19093 - protein, 38 aa, Artificial sequence
  synthetic peptide
LERRDNYTKAEEILSRSIVKRWANFAKYGNPNETQNNS

SEQ ID NO: 19094 - protein, 38 aa, Artificial sequence
  synthetic peptide
ERRDNYTKAEEILSRSIVKRWANFAKYGNPNETQNNST

SEQ ID NO: 19095 - protein, 38 aa, Artificial sequence
  synthetic peptide
RRDNYTKAEEILSRSIVKRWANFAKYGNPNETQNNSTS

SEQ ID NO: 19096 - protein, 38 aa, Artificial sequence
  synthetic peptide
RDNYTKAEEILSRSIVKRWANFAKYGNPNETQNNSTSW

SEQ ID NO: 19097 - protein, 38 aa, Artificial sequence
  synthetic peptide
DNYTKAEEILSRSIVKRWANFAKYGNPNETQNNSTSWP

SEQ ID NO: 19098 - protein, 38 aa, Artificial sequence
  synthetic peptide
NYTKAEEILSRSIVKRWANFAKYGNPNETQNNSTSWPV

SEQ ID NO: 19099 - protein, 38 aa, Artificial sequence
  synthetic peptide
YTKAEEILSRSIVKRWANFAKYGNPNETQNNSTSWPVF

SEQ ID NO: 19100 - protein, 38 aa, Artificial sequence
  synthetic peptide
TKAEEILSRSIVKRWANFAKYGNPNETQNNSTSWPVFK

SEQ ID NO: 19101 - protein, 38 aa, Artificial sequence
  synthetic peptide
KAEEILSRSIVKRWANFAKYGNPNETQNNSTSWPVFKS

SEQ ID NO: 19102 - protein, 38 aa, Artificial sequence
  synthetic peptide
AEEILSRSIVKRWANFAKYGNPNETQNNSTSWPVFKST

SEQ ID NO: 19103 - protein, 38 aa, Artificial sequence
  synthetic peptide
EEILSRSIVKRWANFAKYGNPNETQNNSTSWPVFKSTE

SEQ ID NO: 19104 - protein, 38 aa, Artificial sequence
  synthetic peptide
EILSRSIVKRWANFAKYGNPNETQNNSTSWPVFKSTEQ

SEQ ID NO: 19105 - protein, 38 aa, Artificial sequence
  synthetic peptide
ILSRSIVKRWANFAKYGNPNETQNNSTSWPVFKSTEQK

SEQ ID NO: 19106 - protein, 38 aa, Artificial sequence
  synthetic peptide
LSRSIVKRWANFAKYGNPNETQNNSTSWPVFKSTEQKY

SEQ ID NO: 19107 - protein, 38 aa, Artificial sequence
  synthetic peptide
SRSIVKRWANFAKYGNPNETQNNSTSWPVFKSTEQKYL

SEQ ID NO: 19108 - protein, 38 aa, Artificial sequence
  synthetic peptide
RSIVKRWANFAKYGNPNETQNNSTSWPVFKSTEQKYLT

SEQ ID NO: 19109 - protein, 38 aa, Artificial sequence
  synthetic peptide
SIVKRWANFAKYGNPNETQNNSTSWPVFKSTEQKYLTL

SEQ ID NO: 19110 - protein, 38 aa, Artificial sequence
  synthetic peptide
IVKRWANFAKYGNPNETQNNSTSWPVFKSTEQKYLTLN

SEQ ID NO: 19111 - protein, 38 aa, Artificial sequence
  synthetic peptide
VKRWANFAKYGNPNETQNNSTSWPVFKSTEQKYLTLNT

SEQ ID NO: 19112 - protein, 38 aa, Artificial sequence
  synthetic peptide
KRWANFAKYGNPNETQNNSTSWPVFKSTEQKYLTLNTE

SEQ ID NO: 19113 - protein, 38 aa, Artificial sequence
  synthetic peptide
RWANFAKYGNPNETQNNSTSWPVFKSTEQKYLTLNTES

SEQ ID NO: 19114 - protein, 38 aa, Artificial sequence
  synthetic peptide
WANFAKYGNPNETQNNSTSWPVFKSTEQKYLTLNTEST

SEQ ID NO: 19115 - protein, 38 aa, Artificial sequence
  synthetic peptide
ANFAKYGNPNETQNNSTSWPVFKSTEQKYLTLNTESTR

SEQ ID NO: 19116 - protein, 38 aa, Artificial sequence
  synthetic peptide
NFAKYGNPNETQNNSTSWPVFKSTEQKYLTLNTESTRI

SEQ ID NO: 19117 - protein, 38 aa, Artificial sequence
  synthetic peptide
FAKYGNPNETQNNSTSWPVFKSTEQKYLTLNTESTRIM

SEQ ID NO: 19118 - protein, 38 aa, Artificial sequence
  synthetic peptide
AKYGNPNETQNNSTSWPVFKSTEQKYLTLNTESTRIMT

SEQ ID NO: 19119 - protein, 38 aa, Artificial sequence
  synthetic peptide
KYGNPNETQNNSTSWPVFKSTEQKYLTLNTESTRIMTK

SEQ ID NO: 19120 - protein, 38 aa, Artificial sequence
  synthetic peptide
YGNPNETQNNSTSWPVFKSTEQKYLTLNTESTRIMTKL

SEQ ID NO: 19121 - protein, 38 aa, Artificial sequence
  synthetic peptide
GNPNETQNNSTSWPVFKSTEQKYLTLNTESTRIMTKLR

SEQ ID NO: 19122 - protein, 38 aa, Artificial sequence
  synthetic peptide
NPNETQNNSTSWPVFKSTEQKYLTLNTESTRIMTKLRA

SEQ ID NO: 19123 - protein, 38 aa, Artificial sequence
  synthetic peptide
PNETQNNSTSWPVFKSTEQKYLTLNTESTRIMTKLRAQ

SEQ ID NO: 19124 - protein, 38 aa, Artificial sequence
  synthetic peptide
NETQNNSTSWPVFKSTEQKYLTLNTESTRIMTKLRAQQ

SEQ ID NO: 19125 - protein, 38 aa, Artificial sequence
  synthetic peptide
ETQNNSTSWPVFKSTEQKYLTLNTESTRIMTKLRAQQC

SEQ ID NO: 19126 - protein, 38 aa, Artificial sequence
  synthetic peptide
TQNNSTSWPVFKSTEQKYLTLNTESTRIMTKLRAQQCR

SEQ ID NO: 19127 - protein, 38 aa, Artificial sequence
  synthetic peptide
QNNSTSWPVFKSTEQKYLTLNTESTRIMTKLRAQQCRF

SEQ ID NO: 19128 - protein, 38 aa, Artificial sequence
  synthetic peptide
NNSTSWPVFKSTEQKYLTLNTESTRIMTKLRAQQCRFW

SEQ ID NO: 19129 - protein, 38 aa, Artificial sequence
  synthetic peptide
NSTSWPVFKSTEQKYLTLNTESTRIMTKLRAQQCRFWT

SEQ ID NO: 19130 - protein, 38 aa, Artificial sequence
  synthetic peptide
STSWPVFKSTEQKYLTLNTESTRIMTKLRAQQCRFWTS

SEQ ID NO: 19131 - protein, 38 aa, Artificial sequence
  synthetic peptide
TSWPVFKSTEQKYLTLNTESTRIMTKLRAQQCRFWTSF

SEQ ID NO: 19132 - protein, 38 aa, Artificial sequence
  synthetic peptide
SWPVFKSTEQKYLTLNTESTRIMTKLRAQQCRFWTSFF

SEQ ID NO: 19133 - protein, 38 aa, Artificial sequence
  synthetic peptide
WPVFKSTEQKYLTLNTESTRIMTKLRAQQCRFWTSFFP

SEQ ID NO: 19134 - protein, 38 aa, Artificial sequence
  synthetic peptide
PVFKSTEQKYLTLNTESTRIMTKLRAQQCRFWTSFFPK

SEQ ID NO: 19135 - protein, 38 aa, Artificial sequence
  synthetic peptide
VFKSTEQKYLTLNTESTRIMTKLRAQQCRFWTSFFPKV

SEQ ID NO: 19136 - protein, 38 aa, Artificial sequence
  synthetic peptide
FKSTEQKYLTLNTESTRIMTKLRAQQCRFWTSFFPKVL

SEQ ID NO: 19137 - protein, 38 aa, Artificial sequence
  synthetic peptide
KSTEQKYLTLNTESTRIMTKLRAQQCRFWTSFFPKVLE

SEQ ID NO: 19138 - protein, 38 aa, Artificial sequence
  synthetic peptide
STEQKYLTLNTESTRIMTKLRAQQCRFWTSFFPKVLEM

SEQ ID NO: 19139 - protein, 38 aa, Artificial sequence
  synthetic peptide
TEQKYLTLNTESTRIMTKLRAQQCRFWTSFFPKVLEMT

SEQ ID NO: 19140 - protein, 38 aa, Artificial sequence
  synthetic peptide
EQKYLTLNTESTRIMTKLRAQQCRFWTSFFPKVLEMTG

SEQ ID NO: 19141 - protein, 38 aa, Artificial sequence
  synthetic peptide
QKYLTLNTESTRIMTKLRAQQCRFWTSFFPKVLEMTGN

SEQ ID NO: 19142 - protein, 38 aa, Artificial sequence
  synthetic peptide
KYLTLNTESTRIMTKLRAQQCRFWTSFFPKVLEMTGNI

SEQ ID NO: 19143 - protein, 38 aa, Artificial sequence
  synthetic peptide
YLTLNTESTRIMTKLRAQQCRFWTSFFPKVLEMTGNID

SEQ ID NO: 19144 - protein, 38 aa, Artificial sequence
  synthetic peptide
LTLNTESTRIMTKLRAQQCRFWTSFFPKVLEMTGNIDE

SEQ ID NO: 19145 - protein, 38 aa, Artificial sequence
  synthetic peptide
TLNTESTRIMTKLRAQQCRFWTSFFPKVLEMTGNIDEA

SEQ ID NO: 19146 - protein, 38 aa, Artificial sequence
  synthetic peptide
LNTESTRIMTKLRAQQCRFWTSFFPKVLEMTGNIDEAE

SEQ ID NO: 19147 - protein, 38 aa, Artificial sequence
  synthetic peptide
NTESTRIMTKLRAQQCRFWTSFFPKVLEMTGNIDEAEW

SEQ ID NO: 19148 - protein, 38 aa, Artificial sequence
  synthetic peptide
TESTRIMTKLRAQQCRFWTSFFPKVLEMTGNIDEAEWE

SEQ ID NO: 19149 - protein, 38 aa, Artificial sequence
  synthetic peptide
ESTRIMTKLRAQQCRFWTSFFPKVLEMTGNIDEAEWEW

SEQ ID NO: 19150 - protein, 38 aa, Artificial sequence
  synthetic peptide
STRIMTKLRAQQCRFWTSFFPKVLEMTGNIDEAEWEWK

SEQ ID NO: 19151 - protein, 38 aa, Artificial sequence
  synthetic peptide
TRIMTKLRAQQCRFWTSFFPKVLEMTGNIDEAEWEWKA

SEQ ID NO: 19152 - protein, 38 aa, Artificial sequence
  synthetic peptide
RIMTKLRAQQCRFWTSFFPKVLEMTGNIDEAEWEWKAG

SEQ ID NO: 19153 - protein, 38 aa, Artificial sequence
  synthetic peptide
IMTKLRAQQCRFWTSFFPKVLEMTGNIDEAEWEWKAGF

SEQ ID NO: 19154 - protein, 38 aa, Artificial sequence
  synthetic peptide
MTKLRAQQCRFWTSFFPKVLEMTGNIDEAEWEWKAGFH

SEQ ID NO: 19155 - protein, 38 aa, Artificial sequence
  synthetic peptide
TKLRAQQCRFWTSFFPKVLEMTGNIDEAEWEWKAGFHR

SEQ ID NO: 19156 - protein, 38 aa, Artificial sequence
  synthetic peptide
KLRAQQCRFWTSFFPKVLEMTGNIDEAEWEWKAGFHRW

SEQ ID NO: 19157 - protein, 38 aa, Artificial sequence
  synthetic peptide
LRAQQCRFWTSFFPKVLEMTGNIDEAEWEWKAGFHRWN

SEQ ID NO: 19158 - protein, 38 aa, Artificial sequence
  synthetic peptide
RAQQCRFWTSFFPKVLEMTGNIDEAEWEWKAGFHRWNN

SEQ ID NO: 19159 - protein, 38 aa, Artificial sequence
  synthetic peptide
AQQCRFWTSFFPKVLEMTGNIDEAEWEWKAGFHRWNNY

SEQ ID NO: 19160 - protein, 38 aa, Artificial sequence
  synthetic peptide
QQCRFWTSFFPKVLEMTGNIDEAEWEWKAGFHRWNNYM

SEQ ID NO: 19161 - protein, 38 aa, Artificial sequence
  synthetic peptide
QCRFWTSFFPKVLEMTGNIDEAEWEWKAGFHRWNNYMM

SEQ ID NO: 19162 - protein, 38 aa, Artificial sequence
  synthetic peptide
CRFWTSFFPKVLEMTGNIDEAEWEWKAGFHRWNNYMMD

SEQ ID NO: 19163 - protein, 38 aa, Artificial sequence
  synthetic peptide
RFWTSFFPKVLEMTGNIDEAEWEWKAGFHRWNNYMMDW

SEQ ID NO: 19164 - protein, 38 aa, Artificial sequence
  synthetic peptide
FWTSFFPKVLEMTGNIDEAEWEWKAGFHRWNNYMMDWK

SEQ ID NO: 19165 - protein, 38 aa, Artificial sequence
  synthetic peptide
WTSFFPKVLEMTGNIDEAEWEWKAGFHRWNNYMMDWKN

SEQ ID NO: 19166 - protein, 38 aa, Artificial sequence
  synthetic peptide
TSFFPKVLEMTGNIDEAEWEWKAGFHRWNNYMMDWKNQ

SEQ ID NO: 19167 - protein, 38 aa, Artificial sequence
  synthetic peptide
SFFPKVLEMTGNIDEAEWEWKAGFHRWNNYMMDWKNQF

SEQ ID NO: 19168 - protein, 38 aa, Artificial sequence
  synthetic peptide
FFPKVLEMTGNIDEAEWEWKAGFHRWNNYMMDWKNQFN

SEQ ID NO: 19169 - protein, 38 aa, Artificial sequence
  synthetic peptide
FPKVLEMTGNIDEAEWEWKAGFHRWNNYMMDWKNQFND

SEQ ID NO: 19170 - protein, 38 aa, Artificial sequence
  synthetic peptide
PKVLEMTGNIDEAEWEWKAGFHRWNNYMMDWKNQFNDY

SEQ ID NO: 19171 - protein, 38 aa, Artificial sequence
  synthetic peptide
KVLEMTGNIDEAEWEWKAGFHRWNNYMMDWKNQFNDYT

SEQ ID NO: 19172 - protein, 38 aa, Artificial sequence
  synthetic peptide
VLEMTGNIDEAEWEWKAGFHRWNNYMMDWKNQFNDYTS

SEQ ID NO: 19173 - protein, 38 aa, Artificial sequence
  synthetic peptide
LEMTGNIDEAEWEWKAGFHRWNNYMMDWKNQFNDYTSK

SEQ ID NO: 19174 - protein, 38 aa, Artificial sequence
  synthetic peptide
EMTGNIDEAEWEWKAGFHRWNNYMMDWKNQFNDYTSKK

SEQ ID NO: 19175 - protein, 38 aa, Artificial sequence
  synthetic peptide
MTGNIDEAEWEWKAGFHRWNNYMMDWKNQFNDYTSKKE

SEQ ID NO: 19176 - protein, 38 aa, Artificial sequence
  synthetic peptide
TGNIDEAEWEWKAGFHRWNNYMMDWKNQFNDYTSKKES

SEQ ID NO: 19177 - protein, 38 aa, Artificial sequence
  synthetic peptide
GNIDEAEWEWKAGFHRWNNYMMDWKNQFNDYTSKKESC

SEQ ID NO: 19178 - protein, 38 aa, Artificial sequence
  synthetic peptide
NIDEAEWEWKAGFHRWNNYMMDWKNQFNDYTSKKESCV

SEQ ID NO: 19179 - protein, 38 aa, Artificial sequence
  synthetic peptide
IDEAEWEWKAGFHRWNNYMMDWKNQFNDYTSKKESCVG

SEQ ID NO: 19180 - protein, 38 aa, Artificial sequence
  synthetic peptide
DEAEWEWKAGFHRWNNYMMDWKNQFNDYTSKKESCVGL

SEQ ID NO: 19181 - protein, 39 aa, Artificial sequence
  synthetic peptide
MHSKVTIICIRFLFWFLLLCMLIGKSHTEDDIIIATKNG

SEQ ID NO: 19182 - protein, 39 aa, Artificial sequence
  synthetic peptide
HSKVTIICIRFLFWFLLLCMLIGKSHTEDDIIIATKNGK

SEQ ID NO: 19183 - protein, 39 aa, Artificial sequence
  synthetic peptide
SKVTIICIRFLFWFLLLCMLIGKSHTEDDIIIATKNGKV

SEQ ID NO: 19184 - protein, 39 aa, Artificial sequence
  synthetic peptide
KVTIICIRFLFWFLLLCMLIGKSHTEDDIIIATKNGKVR

SEQ ID NO: 19185 - protein, 39 aa, Artificial sequence
  synthetic peptide
VTIICIRFLFWFLLLCMLIGKSHTEDDIIIATKNGKVRG

SEQ ID NO: 19186 - protein, 39 aa, Artificial sequence
  synthetic peptide
TIICIRFLFWFLLLCMLIGKSHTEDDIIIATKNGKVRGM

SEQ ID NO: 19187 - protein, 39 aa, Artificial sequence
  synthetic peptide
IICIRFLFWFLLLCMLIGKSHTEDDIIIATKNGKVRGMN

SEQ ID NO: 19188 - protein, 39 aa, Artificial sequence
  synthetic peptide
ICIRFLFWFLLLCMLIGKSHTEDDIIIATKNGKVRGMNL

SEQ ID NO: 19189 - protein, 39 aa, Artificial sequence
  synthetic peptide
CIRFLFWFLLLCMLIGKSHTEDDIIIATKNGKVRGMNLT

SEQ ID NO: 19190 - protein, 39 aa, Artificial sequence
  synthetic peptide
IRFLFWFLLLCMLIGKSHTEDDIIIATKNGKVRGMNLTV

SEQ ID NO: 19191 - protein, 39 aa, Artificial sequence
  synthetic peptide
RFLFWFLLLCMLIGKSHTEDDIIIATKNGKVRGMNLTVF

SEQ ID NO: 19192 - protein, 39 aa, Artificial sequence
  synthetic peptide
FLFWFLLLCMLIGKSHTEDDIIIATKNGKVRGMNLTVFG

SEQ ID NO: 19193 - protein, 39 aa, Artificial sequence
  synthetic peptide
LFWFLLLCMLIGKSHTEDDIIIATKNGKVRGMNLTVFGG

SEQ ID NO: 19194 - protein, 39 aa, Artificial sequence
  synthetic peptide
FWFLLLCMLIGKSHTEDDIIIATKNGKVRGMNLTVFGGT

SEQ ID NO: 19195 - protein, 39 aa, Artificial sequence
  synthetic peptide
WFLLLCMLIGKSHTEDDIIIATKNGKVRGMNLTVFGGTV

SEQ ID NO: 19196 - protein, 39 aa, Artificial sequence
  synthetic peptide
FLLLCMLIGKSHTEDDIIIATKNGKVRGMNLTVFGGTVT

SEQ ID NO: 19197 - protein, 39 aa, Artificial sequence
  synthetic peptide
LLLCMLIGKSHTEDDIIIATKNGKVRGMNLTVFGGTVTA

SEQ ID NO: 19198 - protein, 39 aa, Artificial sequence
  synthetic peptide
LLCMLIGKSHTEDDIIIATKNGKVRGMNLTVFGGTVTAF

SEQ ID NO: 19199 - protein, 39 aa, Artificial sequence
  synthetic peptide
LCMLIGKSHTEDDIIIATKNGKVRGMNLTVFGGTVTAFL

SEQ ID NO: 19200 - protein, 39 aa, Artificial sequence
  synthetic peptide
CMLIGKSHTEDDIIIATKNGKVRGMNLTVFGGTVTAFLG

SEQ ID NO: 19201 - protein, 39 aa, Artificial sequence
  synthetic peptide
MLIGKSHTEDDIIIATKNGKVRGMNLTVFGGTVTAFLGI

SEQ ID NO: 19202 - protein, 39 aa, Artificial sequence
  synthetic peptide
LIGKSHTEDDIIIATKNGKVRGMNLTVFGGTVTAFLGIP

SEQ ID NO: 19203 - protein, 39 aa, Artificial sequence
  synthetic peptide
IGKSHTEDDIIIATKNGKVRGMNLTVFGGTVTAFLGIPY

SEQ ID NO: 19204 - protein, 39 aa, Artificial sequence
  synthetic peptide
GKSHTEDDIIIATKNGKVRGMNLTVFGGTVTAFLGIPYA

SEQ ID NO: 19205 - protein, 39 aa, Artificial sequence
  synthetic peptide
KSHTEDDIIIATKNGKVRGMNLTVFGGTVTAFLGIPYAQ

SEQ ID NO: 19206 - protein, 39 aa, Artificial sequence
  synthetic peptide
SHTEDDIIIATKNGKVRGMNLTVFGGTVTAFLGIPYAQP

SEQ ID NO: 19207 - protein, 39 aa, Artificial sequence
  synthetic peptide
HTEDDIIIATKNGKVRGMNLTVFGGTVTAFLGIPYAQPP

SEQ ID NO: 19208 - protein, 39 aa, Artificial sequence
  synthetic peptide
TEDDIIIATKNGKVRGMNLTVFGGTVTAFLGIPYAQPPL

SEQ ID NO: 19209 - protein, 39 aa, Artificial sequence
  synthetic peptide
EDDIIIATKNGKVRGMNLTVFGGTVTAFLGIPYAQPPLG

SEQ ID NO: 19210 - protein, 39 aa, Artificial sequence
  synthetic peptide
DDIIIATKNGKVRGMNLTVFGGTVTAFLGIPYAQPPLGR

SEQ ID NO: 19211 - protein, 39 aa, Artificial sequence
  synthetic peptide
DIIIATKNGKVRGMNLTVFGGTVTAFLGIPYAQPPLGRL

SEQ ID NO: 19212 - protein, 39 aa, Artificial sequence
  synthetic peptide
IIIATKNGKVRGMNLTVFGGTVTAFLGIPYAQPPLGRLR

SEQ ID NO: 19213 - protein, 39 aa, Artificial sequence
  synthetic peptide
IIATKNGKVRGMNLTVFGGTVTAFLGIPYAQPPLGRLRF

SEQ ID NO: 19214 - protein, 39 aa, Artificial sequence
  synthetic peptide
IATKNGKVRGMNLTVFGGTVTAFLGIPYAQPPLGRLRFK

SEQ ID NO: 19215 - protein, 39 aa, Artificial sequence
  synthetic peptide
ATKNGKVRGMNLTVFGGTVTAFLGIPYAQPPLGRLRFKK

SEQ ID NO: 19216 - protein, 39 aa, Artificial sequence
  synthetic peptide
TKNGKVRGMNLTVFGGTVTAFLGIPYAQPPLGRLRFKKP

SEQ ID NO: 19217 - protein, 39 aa, Artificial sequence
  synthetic peptide
KNGKVRGMNLTVFGGTVTAFLGIPYAQPPLGRLRFKKPQ

SEQ ID NO: 19218 - protein, 39 aa, Artificial sequence
  synthetic peptide
NGKVRGMNLTVFGGTVTAFLGIPYAQPPLGRLRFKKPQS

SEQ ID NO: 19219 - protein, 39 aa, Artificial sequence
  synthetic peptide
GKVRGMNLTVFGGTVTAFLGIPYAQPPLGRLRFKKPQSL

SEQ ID NO: 19220 - protein, 39 aa, Artificial sequence
  synthetic peptide
KVRGMNLTVFGGTVTAFLGIPYAQPPLGRLRFKKPQSLT

SEQ ID NO: 19221 - protein, 39 aa, Artificial sequence
  synthetic peptide
VRGMNLTVFGGTVTAFLGIPYAQPPLGRLRFKKPQSLTK

SEQ ID NO: 19222 - protein, 39 aa, Artificial sequence
  synthetic peptide
RGMNLTVFGGTVTAFLGIPYAQPPLGRLRFKKPQSLTKW

SEQ ID NO: 19223 - protein, 39 aa, Artificial sequence
  synthetic peptide
GMNLTVFGGTVTAFLGIPYAQPPLGRLRFKKPQSLTKWS

SEQ ID NO: 19224 - protein, 39 aa, Artificial sequence
  synthetic peptide
MNLTVFGGTVTAFLGIPYAQPPLGRLRFKKPQSLTKWSD

SEQ ID NO: 19225 - protein, 39 aa, Artificial sequence
  synthetic peptide
NLTVFGGTVTAFLGIPYAQPPLGRLRFKKPQSLTKWSDI

SEQ ID NO: 19226 - protein, 39 aa, Artificial sequence
  synthetic peptide
LTVFGGTVTAFLGIPYAQPPLGRLRFKKPQSLTKWSDIW

SEQ ID NO: 19227 - protein, 39 aa, Artificial sequence
  synthetic peptide
TVFGGTVTAFLGIPYAQPPLGRLRFKKPQSLTKWSDIWN

SEQ ID NO: 19228 - protein, 39 aa, Artificial sequence
  synthetic peptide
VFGGTVTAFLGIPYAQPPLGRLRFKKPQSLTKWSDIWNA

SEQ ID NO: 19229 - protein, 39 aa, Artificial sequence
  synthetic peptide
FGGTVTAFLGIPYAQPPLGRLRFKKPQSLTKWSDIWNAT

SEQ ID NO: 19230 - protein, 39 aa, Artificial sequence
  synthetic peptide
GGTVTAFLGIPYAQPPLGRLRFKKPQSLTKWSDIWNATK

SEQ ID NO: 19231 - protein, 39 aa, Artificial sequence
  synthetic peptide
GTVTAFLGIPYAQPPLGRLRFKKPQSLTKWSDIWNATKY

SEQ ID NO: 19232 - protein, 39 aa, Artificial sequence
  synthetic peptide
TVTAFLGIPYAQPPLGRLRFKKPQSLTKWSDIWNATKYA

SEQ ID NO: 19233 - protein, 39 aa, Artificial sequence
  synthetic peptide
VTAFLGIPYAQPPLGRLRFKKPQSLTKWSDIWNATKYAN

SEQ ID NO: 19234 - protein, 39 aa, Artificial sequence
  synthetic peptide
TAFLGIPYAQPPLGRLRFKKPQSLTKWSDIWNATKYANS

SEQ ID NO: 19235 - protein, 39 aa, Artificial sequence
  synthetic peptide
AFLGIPYAQPPLGRLRFKKPQSLTKWSDIWNATKYANSC

SEQ ID NO: 19236 - protein, 39 aa, Artificial sequence
  synthetic peptide
FLGIPYAQPPLGRLRFKKPQSLTKWSDIWNATKYANSCC

SEQ ID NO: 19237 - protein, 39 aa, Artificial sequence
  synthetic peptide
LGIPYAQPPLGRLRFKKPQSLTKWSDIWNATKYANSCCQ

SEQ ID NO: 19238 - protein, 39 aa, Artificial sequence
  synthetic peptide
GIPYAQPPLGRLRFKKPQSLTKWSDIWNATKYANSCCQN

SEQ ID NO: 19239 - protein, 39 aa, Artificial sequence
  synthetic peptide
IPYAQPPLGRLRFKKPQSLTKWSDIWNATKYANSCCQNI

SEQ ID NO: 19240 - protein, 39 aa, Artificial sequence
  synthetic peptide
PYAQPPLGRLRFKKPQSLTKWSDIWNATKYANSCCQNID

SEQ ID NO: 19241 - protein, 39 aa, Artificial sequence
  synthetic peptide
YAQPPLGRLRFKKPQSLTKWSDIWNATKYANSCCQNIDQ

SEQ ID NO: 19242 - protein, 39 aa, Artificial sequence
  synthetic peptide
AQPPLGRLRFKKPQSLTKWSDIWNATKYANSCCQNIDQS

SEQ ID NO: 19243 - protein, 39 aa, Artificial sequence
  synthetic peptide
QPPLGRLRFKKPQSLTKWSDIWNATKYANSCCQNIDQSF

SEQ ID NO: 19244 - protein, 39 aa, Artificial sequence
  synthetic peptide
PPLGRLRFKKPQSLTKWSDIWNATKYANSCCQNIDQSFP

SEQ ID NO: 19245 - protein, 39 aa, Artificial sequence
  synthetic peptide
PLGRLRFKKPQSLTKWSDIWNATKYANSCCQNIDQSFPG

SEQ ID NO: 19246 - protein, 39 aa, Artificial sequence
  synthetic peptide
LGRLRFKKPQSLTKWSDIWNATKYANSCCQNIDQSFPGF

SEQ ID NO: 19247 - protein, 39 aa, Artificial sequence
  synthetic peptide
GRLRFKKPQSLTKWSDIWNATKYANSCCQNIDQSFPGFH

SEQ ID NO: 19248 - protein, 39 aa, Artificial sequence
  synthetic peptide
RLRFKKPQSLTKWSDIWNATKYANSCCQNIDQSFPGFHG

SEQ ID NO: 19249 - protein, 39 aa, Artificial sequence
  synthetic peptide
LRFKKPQSLTKWSDIWNATKYANSCCQNIDQSFPGFHGS

SEQ ID NO: 19250 - protein, 39 aa, Artificial sequence
  synthetic peptide
RFKKPQSLTKWSDIWNATKYANSCCQNIDQSFPGFHGSE

SEQ ID NO: 19251 - protein, 39 aa, Artificial sequence
  synthetic peptide
FKKPQSLTKWSDIWNATKYANSCCQNIDQSFPGFHGSEM

SEQ ID NO: 19252 - protein, 39 aa, Artificial sequence
  synthetic peptide
KKPQSLTKWSDIWNATKYANSCCQNIDQSFPGFHGSEMW

SEQ ID NO: 19253 - protein, 39 aa, Artificial sequence
  synthetic peptide
KPQSLTKWSDIWNATKYANSCCQNIDQSFPGFHGSEMWN

SEQ ID NO: 19254 - protein, 39 aa, Artificial sequence
  synthetic peptide
PQSLTKWSDIWNATKYANSCCQNIDQSFPGFHGSEMWNP

SEQ ID NO: 19255 - protein, 39 aa, Artificial sequence
  synthetic peptide
QSLTKWSDIWNATKYANSCCQNIDQSFPGFHGSEMWNPN

SEQ ID NO: 19256 - protein, 39 aa, Artificial sequence
  synthetic peptide
SLTKWSDIWNATKYANSCCQNIDQSFPGFHGSEMWNPNT

SEQ ID NO: 19257 - protein, 39 aa, Artificial sequence
  synthetic peptide
LTKWSDIWNATKYANSCCQNIDQSFPGFHGSEMWNPNTD

SEQ ID NO: 19258 - protein, 39 aa, Artificial sequence
  synthetic peptide
TKWSDIWNATKYANSCCQNIDQSFPGFHGSEMWNPNTDL

SEQ ID NO: 19259 - protein, 39 aa, Artificial sequence
  synthetic peptide
KWSDIWNATKYANSCCQNIDQSFPGFHGSEMWNPNTDLS

SEQ ID NO: 19260 - protein, 39 aa, Artificial sequence
  synthetic peptide
WSDIWNATKYANSCCQNIDQSFPGFHGSEMWNPNTDLSE

SEQ ID NO: 19261 - protein, 39 aa, Artificial sequence
  synthetic peptide
SDIWNATKYANSCCQNIDQSFPGFHGSEMWNPNTDLSED

SEQ ID NO: 19262 - protein, 39 aa, Artificial sequence
  synthetic peptide
DIWNATKYANSCCQNIDQSFPGFHGSEMWNPNTDLSEDC

SEQ ID NO: 19263 - protein, 39 aa, Artificial sequence
  synthetic peptide
IWNATKYANSCCQNIDQSFPGFHGSEMWNPNTDLSEDCL

SEQ ID NO: 19264 - protein, 39 aa, Artificial sequence
  synthetic peptide
WNATKYANSCCQNIDQSFPGFHGSEMWNPNTDLSEDCLY

SEQ ID NO: 19265 - protein, 39 aa, Artificial sequence
  synthetic peptide
NATKYANSCCQNIDQSFPGFHGSEMWNPNTDLSEDCLYL

SEQ ID NO: 19266 - protein, 39 aa, Artificial sequence
  synthetic peptide
ATKYANSCCQNIDQSFPGFHGSEMWNPNTDLSEDCLYLN

SEQ ID NO: 19267 - protein, 39 aa, Artificial sequence
  synthetic peptide
TKYANSCCQNIDQSFPGFHGSEMWNPNTDLSEDCLYLNV

SEQ ID NO: 19268 - protein, 39 aa, Artificial sequence
  synthetic peptide
KYANSCCQNIDQSFPGFHGSEMWNPNTDLSEDCLYLNVW

SEQ ID NO: 19269 - protein, 39 aa, Artificial sequence
  synthetic peptide
YANSCCQNIDQSFPGFHGSEMWNPNTDLSEDCLYLNVWI

SEQ ID NO: 19270 - protein, 39 aa, Artificial sequence
  synthetic peptide
ANSCCQNIDQSFPGFHGSEMWNPNTDLSEDCLYLNVWIP

SEQ ID NO: 19271 - protein, 39 aa, Artificial sequence
  synthetic peptide
NSCCQNIDQSFPGFHGSEMWNPNTDLSEDCLYLNVWIPA

SEQ ID NO: 19272 - protein, 39 aa, Artificial sequence
  synthetic peptide
SCCQNIDQSFPGFHGSEMWNPNTDLSEDCLYLNVWIPAP

SEQ ID NO: 19273 - protein, 39 aa, Artificial sequence
  synthetic peptide
CCQNIDQSFPGFHGSEMWNPNTDLSEDCLYLNVWIPAPK

SEQ ID NO: 19274 - protein, 39 aa, Artificial sequence
  synthetic peptide
CQNIDQSFPGFHGSEMWNPNTDLSEDCLYLNVWIPAPKP

SEQ ID NO: 19275 - protein, 39 aa, Artificial sequence
  synthetic peptide
QNIDQSFPGFHGSEMWNPNTDLSEDCLYLNVWIPAPKPK

SEQ ID NO: 19276 - protein, 39 aa, Artificial sequence
  synthetic peptide
NIDQSFPGFHGSEMWNPNTDLSEDCLYLNVWIPAPKPKN

SEQ ID NO: 19277 - protein, 39 aa, Artificial sequence
  synthetic peptide
IDQSFPGFHGSEMWNPNTDLSEDCLYLNVWIPAPKPKNA

SEQ ID NO: 19278 - protein, 39 aa, Artificial sequence
  synthetic peptide
DQSFPGFHGSEMWNPNTDLSEDCLYLNVWIPAPKPKNAT

SEQ ID NO: 19279 - protein, 39 aa, Artificial sequence
  synthetic peptide
QSFPGFHGSEMWNPNTDLSEDCLYLNVWIPAPKPKNATV

SEQ ID NO: 19280 - protein, 39 aa, Artificial sequence
  synthetic peptide
SFPGFHGSEMWNPNTDLSEDCLYLNVWIPAPKPKNATVL

SEQ ID NO: 19281 - protein, 39 aa, Artificial sequence
  synthetic peptide
FPGFHGSEMWNPNTDLSEDCLYLNVWIPAPKPKNATVLI

SEQ ID NO: 19282 - protein, 39 aa, Artificial sequence
  synthetic peptide
PGFHGSEMWNPNTDLSEDCLYLNVWIPAPKPKNATVLIW

SEQ ID NO: 19283 - protein, 39 aa, Artificial sequence
  synthetic peptide
GFHGSEMWNPNTDLSEDCLYLNVWIPAPKPKNATVLIWI

SEQ ID NO: 19284 - protein, 39 aa, Artificial sequence
  synthetic peptide
FHGSEMWNPNTDLSEDCLYLNVWIPAPKPKNATVLIWIY

SEQ ID NO: 19285 - protein, 39 aa, Artificial sequence
  synthetic peptide
HGSEMWNPNTDLSEDCLYLNVWIPAPKPKNATVLIWIYG

SEQ ID NO: 19286 - protein, 39 aa, Artificial sequence
  synthetic peptide
GSEMWNPNTDLSEDCLYLNVWIPAPKPKNATVLIWIYGG

SEQ ID NO: 19287 - protein, 39 aa, Artificial sequence
  synthetic peptide
SEMWNPNTDLSEDCLYLNVWIPAPKPKNATVLIWIYGGG

SEQ ID NO: 19288 - protein, 39 aa, Artificial sequence
  synthetic peptide
EMWNPNTDLSEDCLYLNVWIPAPKPKNATVLIWIYGGGF

SEQ ID NO: 19289 - protein, 39 aa, Artificial sequence
  synthetic peptide
MWNPNTDLSEDCLYLNVWIPAPKPKNATVLIWIYGGGFQ

SEQ ID NO: 19290 - protein, 39 aa, Artificial sequence
  synthetic peptide
WNPNTDLSEDCLYLNVWIPAPKPKNATVLIWIYGGGFQT

SEQ ID NO: 19291 - protein, 39 aa, Artificial sequence
  synthetic peptide
NPNTDLSEDCLYLNVWIPAPKPKNATVLIWIYGGGFQTG

SEQ ID NO: 19292 - protein, 39 aa, Artificial sequence
  synthetic peptide
PNTDLSEDCLYLNVWIPAPKPKNATVLIWIYGGGFQTGT

SEQ ID NO: 19293 - protein, 39 aa, Artificial sequence
  synthetic peptide
NTDLSEDCLYLNVWIPAPKPKNATVLIWIYGGGFQTGTS

SEQ ID NO: 19294 - protein, 39 aa, Artificial sequence
  synthetic peptide
TDLSEDCLYLNVWIPAPKPKNATVLIWIYGGGFQTGTSS

SEQ ID NO: 19295 - protein, 39 aa, Artificial sequence
  synthetic peptide
DLSEDCLYLNVWIPAPKPKNATVLIWIYGGGFQTGTSSL

SEQ ID NO: 19296 - protein, 39 aa, Artificial sequence
  synthetic peptide
LSEDCLYLNVWIPAPKPKNATVLIWIYGGGFQTGTSSLH

SEQ ID NO: 19297 - protein, 39 aa, Artificial sequence
  synthetic peptide
SEDCLYLNVWIPAPKPKNATVLIWIYGGGFQTGTSSLHV

SEQ ID NO: 19298 - protein, 39 aa, Artificial sequence
  synthetic peptide
EDCLYLNVWIPAPKPKNATVLIWIYGGGFQTGTSSLHVY

SEQ ID NO: 19299 - protein, 39 aa, Artificial sequence
  synthetic peptide
DCLYLNVWIPAPKPKNATVLIWIYGGGFQTGTSSLHVYD

SEQ ID NO: 19300 - protein, 39 aa, Artificial sequence
  synthetic peptide
CLYLNVWIPAPKPKNATVLIWIYGGGFQTGTSSLHVYDG

SEQ ID NO: 19301 - protein, 39 aa, Artificial sequence
  synthetic peptide
LYLNVWIPAPKPKNATVLIWIYGGGFQTGTSSLHVYDGK

SEQ ID NO: 19302 - protein, 39 aa, Artificial sequence
  synthetic peptide
YLNVWIPAPKPKNATVLIWIYGGGFQTGTSSLHVYDGKF

SEQ ID NO: 19303 - protein, 39 aa, Artificial sequence
  synthetic peptide
LNVWIPAPKPKNATVLIWIYGGGFQTGTSSLHVYDGKFL

SEQ ID NO: 19304 - protein, 39 aa, Artificial sequence
  synthetic peptide
NVWIPAPKPKNATVLIWIYGGGFQTGTSSLHVYDGKFLA

SEQ ID NO: 19305 - protein, 39 aa, Artificial sequence
  synthetic peptide
VWIPAPKPKNATVLIWIYGGGFQTGTSSLHVYDGKFLAR

SEQ ID NO: 19306 - protein, 39 aa, Artificial sequence
  synthetic peptide
WIPAPKPKNATVLIWIYGGGFQTGTSSLHVYDGKFLARV

SEQ ID NO: 19307 - protein, 39 aa, Artificial sequence
  synthetic peptide
IPAPKPKNATVLIWIYGGGFQTGTSSLHVYDGKFLARVE

SEQ ID NO: 19308 - protein, 39 aa, Artificial sequence
  synthetic peptide
PAPKPKNATVLIWIYGGGFQTGTSSLHVYDGKFLARVER

SEQ ID NO: 19309 - protein, 39 aa, Artificial sequence
  synthetic peptide
APKPKNATVLIWIYGGGFQTGTSSLHVYDGKFLARVERV

SEQ ID NO: 19310 - protein, 39 aa, Artificial sequence
  synthetic peptide
PKPKNATVLIWIYGGGFQTGTSSLHVYDGKFLARVERVI

SEQ ID NO: 19311 - protein, 39 aa, Artificial sequence
  synthetic peptide
KPKNATVLIWIYGGGFQTGTSSLHVYDGKFLARVERVIV

SEQ ID NO: 19312 - protein, 39 aa, Artificial sequence
  synthetic peptide
PKNATVLIWIYGGGFQTGTSSLHVYDGKFLARVERVIVV

SEQ ID NO: 19313 - protein, 39 aa, Artificial sequence
  synthetic peptide
KNATVLIWIYGGGFQTGTSSLHVYDGKFLARVERVIVVS

SEQ ID NO: 19314 - protein, 39 aa, Artificial sequence
  synthetic peptide
NATVLIWIYGGGFQTGTSSLHVYDGKFLARVERVIVVSM

SEQ ID NO: 19315 - protein, 39 aa, Artificial sequence
  synthetic peptide
ATVLIWIYGGGFQTGTSSLHVYDGKFLARVERVIVVSMN

SEQ ID NO: 19316 - protein, 39 aa, Artificial sequence
  synthetic peptide
TVLIWIYGGGFQTGTSSLHVYDGKFLARVERVIVVSMNY

SEQ ID NO: 19317 - protein, 39 aa, Artificial sequence
  synthetic peptide
VLIWIYGGGFQTGTSSLHVYDGKFLARVERVIVVSMNYR

SEQ ID NO: 19318 - protein, 39 aa, Artificial sequence
  synthetic peptide
LIWIYGGGFQTGTSSLHVYDGKFLARVERVIVVSMNYRV

SEQ ID NO: 19319 - protein, 39 aa, Artificial sequence
  synthetic peptide
IWIYGGGFQTGTSSLHVYDGKFLARVERVIVVSMNYRVG

SEQ ID NO: 19320 - protein, 39 aa, Artificial sequence
  synthetic peptide
WIYGGGFQTGTSSLHVYDGKFLARVERVIVVSMNYRVGA

SEQ ID NO: 19321 - protein, 39 aa, Artificial sequence
  synthetic peptide
IYGGGFQTGTSSLHVYDGKFLARVERVIVVSMNYRVGAL

SEQ ID NO: 19322 - protein, 39 aa, Artificial sequence
  synthetic peptide
YGGGFQTGTSSLHVYDGKFLARVERVIVVSMNYRVGALG

SEQ ID NO: 19323 - protein, 39 aa, Artificial sequence
  synthetic peptide
GGGFQTGTSSLHVYDGKFLARVERVIVVSMNYRVGALGF

SEQ ID NO: 19324 - protein, 39 aa, Artificial sequence
  synthetic peptide
GGFQTGTSSLHVYDGKFLARVERVIVVSMNYRVGALGFL

SEQ ID NO: 19325 - protein, 39 aa, Artificial sequence
  synthetic peptide
GFQTGTSSLHVYDGKFLARVERVIVVSMNYRVGALGFLA

SEQ ID NO: 19326 - protein, 39 aa, Artificial sequence
  synthetic peptide
FQTGTSSLHVYDGKFLARVERVIVVSMNYRVGALGFLAL

SEQ ID NO: 19327 - protein, 39 aa, Artificial sequence
  synthetic peptide
QTGTSSLHVYDGKFLARVERVIVVSMNYRVGALGFLALP

SEQ ID NO: 19328 - protein, 39 aa, Artificial sequence
  synthetic peptide
TGTSSLHVYDGKFLARVERVIVVSMNYRVGALGFLALPG

SEQ ID NO: 19329 - protein, 39 aa, Artificial sequence
  synthetic peptide
GTSSLHVYDGKFLARVERVIVVSMNYRVGALGFLALPGN

SEQ ID NO: 19330 - protein, 39 aa, Artificial sequence
  synthetic peptide
TSSLHVYDGKFLARVERVIVVSMNYRVGALGFLALPGNP

SEQ ID NO: 19331 - protein, 39 aa, Artificial sequence
  synthetic peptide
SSLHVYDGKFLARVERVIVVSMNYRVGALGFLALPGNPE

SEQ ID NO: 19332 - protein, 39 aa, Artificial sequence
  synthetic peptide
SLHVYDGKFLARVERVIVVSMNYRVGALGFLALPGNPEA

SEQ ID NO: 19333 - protein, 39 aa, Artificial sequence
  synthetic peptide
LHVYDGKFLARVERVIVVSMNYRVGALGFLALPGNPEAP

SEQ ID NO: 19334 - protein, 39 aa, Artificial sequence
  synthetic peptide
HVYDGKFLARVERVIVVSMNYRVGALGFLALPGNPEAPG

SEQ ID NO: 19335 - protein, 39 aa, Artificial sequence
  synthetic peptide
VYDGKFLARVERVIVVSMNYRVGALGFLALPGNPEAPGN

SEQ ID NO: 19336 - protein, 39 aa, Artificial sequence
  synthetic peptide
YDGKFLARVERVIVVSMNYRVGALGFLALPGNPEAPGNM

SEQ ID NO: 19337 - protein, 39 aa, Artificial sequence
  synthetic peptide
DGKFLARVERVIVVSMNYRVGALGFLALPGNPEAPGNMG

SEQ ID NO: 19338 - protein, 39 aa, Artificial sequence
  synthetic peptide
GKFLARVERVIVVSMNYRVGALGFLALPGNPEAPGNMGL

SEQ ID NO: 19339 - protein, 39 aa, Artificial sequence
  synthetic peptide
KFLARVERVIVVSMNYRVGALGFLALPGNPEAPGNMGLF

SEQ ID NO: 19340 - protein, 39 aa, Artificial sequence
  synthetic peptide
FLARVERVIVVSMNYRVGALGFLALPGNPEAPGNMGLFD

SEQ ID NO: 19341 - protein, 39 aa, Artificial sequence
  synthetic peptide
LARVERVIVVSMNYRVGALGFLALPGNPEAPGNMGLFDQ

SEQ ID NO: 19342 - protein, 39 aa, Artificial sequence
  synthetic peptide
ARVERVIVVSMNYRVGALGFLALPGNPEAPGNMGLFDQQ

SEQ ID NO: 19343 - protein, 39 aa, Artificial sequence
  synthetic peptide
RVERVIVVSMNYRVGALGFLALPGNPEAPGNMGLFDQQL

SEQ ID NO: 19344 - protein, 39 aa, Artificial sequence
  synthetic peptide
VERVIVVSMNYRVGALGFLALPGNPEAPGNMGLFDQQLA

SEQ ID NO: 19345 - protein, 39 aa, Artificial sequence
  synthetic peptide
ERVIVVSMNYRVGALGFLALPGNPEAPGNMGLFDQQLAL

SEQ ID NO: 19346 - protein, 39 aa, Artificial sequence
  synthetic peptide
RVIVVSMNYRVGALGFLALPGNPEAPGNMGLFDQQLALQ

SEQ ID NO: 19347 - protein, 39 aa, Artificial sequence
  synthetic peptide
VIVVSMNYRVGALGFLALPGNPEAPGNMGLFDQQLALQW

SEQ ID NO: 19348 - protein, 39 aa, Artificial sequence
  synthetic peptide
IVVSMNYRVGALGFLALPGNPEAPGNMGLFDQQLALQWV

SEQ ID NO: 19349 - protein, 39 aa, Artificial sequence
  synthetic peptide
VVSMNYRVGALGFLALPGNPEAPGNMGLFDQQLALQWVQ

SEQ ID NO: 19350 - protein, 39 aa, Artificial sequence
  synthetic peptide
VSMNYRVGALGFLALPGNPEAPGNMGLFDQQLALQWVQK

SEQ ID NO: 19351 - protein, 39 aa, Artificial sequence
  synthetic peptide
SMNYRVGALGFLALPGNPEAPGNMGLFDQQLALQWVQKN

SEQ ID NO: 19352 - protein, 39 aa, Artificial sequence
  synthetic peptide
MNYRVGALGFLALPGNPEAPGNMGLFDQQLALQWVQKNI

SEQ ID NO: 19353 - protein, 39 aa, Artificial sequence
  synthetic peptide
NYRVGALGFLALPGNPEAPGNMGLFDQQLALQWVQKNIA

SEQ ID NO: 19354 - protein, 39 aa, Artificial sequence
  synthetic peptide
YRVGALGFLALPGNPEAPGNMGLFDQQLALQWVQKNIAA

SEQ ID NO: 19355 - protein, 39 aa, Artificial sequence
  synthetic peptide
RVGALGFLALPGNPEAPGNMGLFDQQLALQWVQKNIAAF

SEQ ID NO: 19356 - protein, 39 aa, Artificial sequence
  synthetic peptide
VGALGFLALPGNPEAPGNMGLFDQQLALQWVQKNIAAFG

SEQ ID NO: 19357 - protein, 39 aa, Artificial sequence
  synthetic peptide
GALGFLALPGNPEAPGNMGLFDQQLALQWVQKNIAAFGG

SEQ ID NO: 19358 - protein, 39 aa, Artificial sequence
  synthetic peptide
ALGFLALPGNPEAPGNMGLFDQQLALQWVQKNIAAFGGN

SEQ ID NO: 19359 - protein, 39 aa, Artificial sequence
  synthetic peptide
LGFLALPGNPEAPGNMGLFDQQLALQWVQKNIAAFGGNP

SEQ ID NO: 19360 - protein, 39 aa, Artificial sequence
  synthetic peptide
GFLALPGNPEAPGNMGLFDQQLALQWVQKNIAAFGGNPK

SEQ ID NO: 19361 - protein, 39 aa, Artificial sequence
  synthetic peptide
FLALPGNPEAPGNMGLFDQQLALQWVQKNIAAFGGNPKS

SEQ ID NO: 19362 - protein, 39 aa, Artificial sequence
  synthetic peptide
LALPGNPEAPGNMGLFDQQLALQWVQKNIAAFGGNPKSV

SEQ ID NO: 19363 - protein, 39 aa, Artificial sequence
  synthetic peptide
ALPGNPEAPGNMGLFDQQLALQWVQKNIAAFGGNPKSVT

SEQ ID NO: 19364 - protein, 39 aa, Artificial sequence
  synthetic peptide
LPGNPEAPGNMGLFDQQLALQWVQKNIAAFGGNPKSVTL

SEQ ID NO: 19365 - protein, 39 aa, Artificial sequence
  synthetic peptide
PGNPEAPGNMGLFDQQLALQWVQKNIAAFGGNPKSVTLF

SEQ ID NO: 19366 - protein, 39 aa, Artificial sequence
  synthetic peptide
GNPEAPGNMGLFDQQLALQWVQKNIAAFGGNPKSVTLFG

SEQ ID NO: 19367 - protein, 39 aa, Artificial sequence
  synthetic peptide
NPEAPGNMGLFDQQLALQWVQKNIAAFGGNPKSVTLFGE

SEQ ID NO: 19368 - protein, 39 aa, Artificial sequence
  synthetic peptide
PEAPGNMGLFDQQLALQWVQKNIAAFGGNPKSVTLFGES

SEQ ID NO: 19369 - protein, 39 aa, Artificial sequence
  synthetic peptide
EAPGNMGLFDQQLALQWVQKNIAAFGGNPKSVTLFGESA

SEQ ID NO: 19370 - protein, 39 aa, Artificial sequence
  synthetic peptide
APGNMGLFDQQLALQWVQKNIAAFGGNPKSVTLFGESAG

SEQ ID NO: 19371 - protein, 39 aa, Artificial sequence
  synthetic peptide
PGNMGLFDQQLALQWVQKNIAAFGGNPKSVTLFGESAGA

SEQ ID NO: 19372 - protein, 39 aa, Artificial sequence
  synthetic peptide
GNMGLFDQQLALQWVQKNIAAFGGNPKSVTLFGESAGAA

SEQ ID NO: 19373 - protein, 39 aa, Artificial sequence
  synthetic peptide
NMGLFDQQLALQWVQKNIAAFGGNPKSVTLFGESAGAAS

SEQ ID NO: 19374 - protein, 39 aa, Artificial sequence
  synthetic peptide
MGLFDQQLALQWVQKNIAAFGGNPKSVTLFGESAGAASV

SEQ ID NO: 19375 - protein, 39 aa, Artificial sequence
  synthetic peptide
GLFDQQLALQWVQKNIAAFGGNPKSVTLFGESAGAASVS

SEQ ID NO: 19376 - protein, 39 aa, Artificial sequence
  synthetic peptide
LFDQQLALQWVQKNIAAFGGNPKSVTLFGESAGAASVSL

SEQ ID NO: 19377 - protein, 39 aa, Artificial sequence
  synthetic peptide
FDQQLALQWVQKNIAAFGGNPKSVTLFGESAGAASVSLH

SEQ ID NO: 19378 - protein, 39 aa, Artificial sequence
  synthetic peptide
DQQLALQWVQKNIAAFGGNPKSVTLFGESAGAASVSLHL

SEQ ID NO: 19379 - protein, 39 aa, Artificial sequence
  synthetic peptide
QQLALQWVQKNIAAFGGNPKSVTLFGESAGAASVSLHLL

SEQ ID NO: 19380 - protein, 39 aa, Artificial sequence
  synthetic peptide
QLALQWVQKNIAAFGGNPKSVTLFGESAGAASVSLHLLS

SEQ ID NO: 19381 - protein, 39 aa, Artificial sequence
  synthetic peptide
LALQWVQKNIAAFGGNPKSVTLFGESAGAASVSLHLLSP

SEQ ID NO: 19382 - protein, 39 aa, Artificial sequence
  synthetic peptide
ALQWVQKNIAAFGGNPKSVTLFGESAGAASVSLHLLSPG

SEQ ID NO: 19383 - protein, 39 aa, Artificial sequence
  synthetic peptide
LQWVQKNIAAFGGNPKSVTLFGESAGAASVSLHLLSPGS

SEQ ID NO: 19384 - protein, 39 aa, Artificial sequence
  synthetic peptide
QWVQKNIAAFGGNPKSVTLFGESAGAASVSLHLLSPGSH

SEQ ID NO: 19385 - protein, 39 aa, Artificial sequence
  synthetic peptide
WVQKNIAAFGGNPKSVTLFGESAGAASVSLHLLSPGSHS

SEQ ID NO: 19386 - protein, 39 aa, Artificial sequence
  synthetic peptide
VQKNIAAFGGNPKSVTLFGESAGAASVSLHLLSPGSHSL

SEQ ID NO: 19387 - protein, 39 aa, Artificial sequence
  synthetic peptide
QKNIAAFGGNPKSVTLFGESAGAASVSLHLLSPGSHSLF

SEQ ID NO: 19388 - protein, 39 aa, Artificial sequence
  synthetic peptide
KNIAAFGGNPKSVTLFGESAGAASVSLHLLSPGSHSLFT

SEQ ID NO: 19389 - protein, 39 aa, Artificial sequence
  synthetic peptide
NIAAFGGNPKSVTLFGESAGAASVSLHLLSPGSHSLFTR

SEQ ID NO: 19390 - protein, 39 aa, Artificial sequence
  synthetic peptide
IAAFGGNPKSVTLFGESAGAASVSLHLLSPGSHSLFTRA

SEQ ID NO: 19391 - protein, 39 aa, Artificial sequence
  synthetic peptide
AAFGGNPKSVTLFGESAGAASVSLHLLSPGSHSLFTRAI

SEQ ID NO: 19392 - protein, 39 aa, Artificial sequence
  synthetic peptide
AFGGNPKSVTLFGESAGAASVSLHLLSPGSHSLFTRAIL

SEQ ID NO: 19393 - protein, 39 aa, Artificial sequence
  synthetic peptide
FGGNPKSVTLFGESAGAASVSLHLLSPGSHSLFTRAILQ

SEQ ID NO: 19394 - protein, 39 aa, Artificial sequence
  synthetic peptide
GGNPKSVTLFGESAGAASVSLHLLSPGSHSLFTRAILQS

SEQ ID NO: 19395 - protein, 39 aa, Artificial sequence
  synthetic peptide
GNPKSVTLFGESAGAASVSLHLLSPGSHSLFTRAILQSG

SEQ ID NO: 19396 - protein, 39 aa, Artificial sequence
  synthetic peptide
NPKSVTLFGESAGAASVSLHLLSPGSHSLFTRAILQSGS

SEQ ID NO: 19397 - protein, 39 aa, Artificial sequence
  synthetic peptide
PKSVTLFGESAGAASVSLHLLSPGSHSLFTRAILQSGSF

SEQ ID NO: 19398 - protein, 39 aa, Artificial sequence
  synthetic peptide
KSVTLFGESAGAASVSLHLLSPGSHSLFTRAILQSGSFN

SEQ ID NO: 19399 - protein, 39 aa, Artificial sequence
  synthetic peptide
SVTLFGESAGAASVSLHLLSPGSHSLFTRAILQSGSFNA

SEQ ID NO: 19400 - protein, 39 aa, Artificial sequence
  synthetic peptide
VTLFGESAGAASVSLHLLSPGSHSLFTRAILQSGSFNAP

SEQ ID NO: 19401 - protein, 39 aa, Artificial sequence
  synthetic peptide
TLFGESAGAASVSLHLLSPGSHSLFTRAILQSGSFNAPW

SEQ ID NO: 19402 - protein, 39 aa, Artificial sequence
  synthetic peptide
LFGESAGAASVSLHLLSPGSHSLFTRAILQSGSFNAPWA

SEQ ID NO: 19403 - protein, 39 aa, Artificial sequence
  synthetic peptide
FGESAGAASVSLHLLSPGSHSLFTRAILQSGSFNAPWAV

SEQ ID NO: 19404 - protein, 39 aa, Artificial sequence
  synthetic peptide
GESAGAASVSLHLLSPGSHSLFTRAILQSGSFNAPWAVT

SEQ ID NO: 19405 - protein, 39 aa, Artificial sequence
  synthetic peptide
ESAGAASVSLHLLSPGSHSLFTRAILQSGSFNAPWAVTS

SEQ ID NO: 19406 - protein, 39 aa, Artificial sequence
  synthetic peptide
SAGAASVSLHLLSPGSHSLFTRAILQSGSFNAPWAVTSL

SEQ ID NO: 19407 - protein, 39 aa, Artificial sequence
  synthetic peptide
AGAASVSLHLLSPGSHSLFTRAILQSGSFNAPWAVTSLY

SEQ ID NO: 19408 - protein, 39 aa, Artificial sequence
  synthetic peptide
GAASVSLHLLSPGSHSLFTRAILQSGSFNAPWAVTSLYE

SEQ ID NO: 19409 - protein, 39 aa, Artificial sequence
  synthetic peptide
AASVSLHLLSPGSHSLFTRAILQSGSFNAPWAVTSLYEA

SEQ ID NO: 19410 - protein, 39 aa, Artificial sequence
  synthetic peptide
ASVSLHLLSPGSHSLFTRAILQSGSFNAPWAVTSLYEAR

SEQ ID NO: 19411 - protein, 39 aa, Artificial sequence
  synthetic peptide
SVSLHLLSPGSHSLFTRAILQSGSFNAPWAVTSLYEARN

SEQ ID NO: 19412 - protein, 39 aa, Artificial sequence
  synthetic peptide
VSLHLLSPGSHSLFTRAILQSGSFNAPWAVTSLYEARNR

SEQ ID NO: 19413 - protein, 39 aa, Artificial sequence
  synthetic peptide
SLHLLSPGSHSLFTRAILQSGSFNAPWAVTSLYEARNRT

SEQ ID NO: 19414 - protein, 39 aa, Artificial sequence
  synthetic peptide
LHLLSPGSHSLFTRAILQSGSFNAPWAVTSLYEARNRTL

SEQ ID NO: 19415 - protein, 39 aa, Artificial sequence
  synthetic peptide
HLLSPGSHSLFTRAILQSGSFNAPWAVTSLYEARNRTLN

SEQ ID NO: 19416 - protein, 39 aa, Artificial sequence
  synthetic peptide
LLSPGSHSLFTRAILQSGSFNAPWAVTSLYEARNRTLNL

SEQ ID NO: 19417 - protein, 39 aa, Artificial sequence
  synthetic peptide
LSPGSHSLFTRAILQSGSFNAPWAVTSLYEARNRTLNLA

SEQ ID NO: 19418 - protein, 39 aa, Artificial sequence
  synthetic peptide
SPGSHSLFTRAILQSGSFNAPWAVTSLYEARNRTLNLAK

SEQ ID NO: 19419 - protein, 39 aa, Artificial sequence
  synthetic peptide
PGSHSLFTRAILQSGSFNAPWAVTSLYEARNRTLNLAKL

SEQ ID NO: 19420 - protein, 39 aa, Artificial sequence
  synthetic peptide
GSHSLFTRAILQSGSFNAPWAVTSLYEARNRTLNLAKLT

SEQ ID NO: 19421 - protein, 39 aa, Artificial sequence
  synthetic peptide
SHSLFTRAILQSGSFNAPWAVTSLYEARNRTLNLAKLTG

SEQ ID NO: 19422 - protein, 39 aa, Artificial sequence
  synthetic peptide
HSLFTRAILQSGSFNAPWAVTSLYEARNRTLNLAKLTGC

SEQ ID NO: 19423 - protein, 39 aa, Artificial sequence
  synthetic peptide
SLFTRAILQSGSFNAPWAVTSLYEARNRTLNLAKLTGCS

SEQ ID NO: 19424 - protein, 39 aa, Artificial sequence
  synthetic peptide
LFTRAILQSGSFNAPWAVTSLYEARNRTLNLAKLTGCSR

SEQ ID NO: 19425 - protein, 39 aa, Artificial sequence
  synthetic peptide
FTRAILQSGSFNAPWAVTSLYEARNRTLNLAKLTGCSRE

SEQ ID NO: 19426 - protein, 39 aa, Artificial sequence
  synthetic peptide
TRAILQSGSFNAPWAVTSLYEARNRTLNLAKLTGCSREN

SEQ ID NO: 19427 - protein, 39 aa, Artificial sequence
  synthetic peptide
RAILQSGSFNAPWAVTSLYEARNRTLNLAKLTGCSRENE

SEQ ID NO: 19428 - protein, 39 aa, Artificial sequence
  synthetic peptide
AILQSGSFNAPWAVTSLYEARNRTLNLAKLTGCSRENET

SEQ ID NO: 19429 - protein, 39 aa, Artificial sequence
  synthetic peptide
ILQSGSFNAPWAVTSLYEARNRTLNLAKLTGCSRENETE

SEQ ID NO: 19430 - protein, 39 aa, Artificial sequence
  synthetic peptide
LQSGSFNAPWAVTSLYEARNRTLNLAKLTGCSRENETEI

SEQ ID NO: 19431 - protein, 39 aa, Artificial sequence
  synthetic peptide
QSGSFNAPWAVTSLYEARNRTLNLAKLTGCSRENETEII

SEQ ID NO: 19432 - protein, 39 aa, Artificial sequence
  synthetic peptide
SGSFNAPWAVTSLYEARNRTLNLAKLTGCSRENETEIIK

SEQ ID NO: 19433 - protein, 39 aa, Artificial sequence
  synthetic peptide
GSFNAPWAVTSLYEARNRTLNLAKLTGCSRENETEIIKC

SEQ ID NO: 19434 - protein, 39 aa, Artificial sequence
  synthetic peptide
SFNAPWAVTSLYEARNRTLNLAKLTGCSRENETEIIKCL

SEQ ID NO: 19435 - protein, 39 aa, Artificial sequence
  synthetic peptide
FNAPWAVTSLYEARNRTLNLAKLTGCSRENETEIIKCLR

SEQ ID NO: 19436 - protein, 39 aa, Artificial sequence
  synthetic peptide
NAPWAVTSLYEARNRTLNLAKLTGCSRENETEIIKCLRN

SEQ ID NO: 19437 - protein, 39 aa, Artificial sequence
  synthetic peptide
APWAVTSLYEARNRTLNLAKLTGCSRENETEIIKCLRNK

SEQ ID NO: 19438 - protein, 39 aa, Artificial sequence
  synthetic peptide
PWAVTSLYEARNRTLNLAKLTGCSRENETEIIKCLRNKD

SEQ ID NO: 19439 - protein, 39 aa, Artificial sequence
  synthetic peptide
WAVTSLYEARNRTLNLAKLTGCSRENETEIIKCLRNKDP

SEQ ID NO: 19440 - protein, 39 aa, Artificial sequence
  synthetic peptide
AVTSLYEARNRTLNLAKLTGCSRENETEIIKCLRNKDPQ

SEQ ID NO: 19441 - protein, 39 aa, Artificial sequence
  synthetic peptide
VTSLYEARNRTLNLAKLTGCSRENETEIIKCLRNKDPQE

SEQ ID NO: 19442 - protein, 39 aa, Artificial sequence
  synthetic peptide
TSLYEARNRTLNLAKLTGCSRENETEIIKCLRNKDPQEI

SEQ ID NO: 19443 - protein, 39 aa, Artificial sequence
  synthetic peptide
SLYEARNRTLNLAKLTGCSRENETEIIKCLRNKDPQEIL

SEQ ID NO: 19444 - protein, 39 aa, Artificial sequence
  synthetic peptide
LYEARNRTLNLAKLTGCSRENETEIIKCLRNKDPQEILL

SEQ ID NO: 19445 - protein, 39 aa, Artificial sequence
  synthetic peptide
YEARNRTLNLAKLTGCSRENETEIIKCLRNKDPQEILLN

SEQ ID NO: 19446 - protein, 39 aa, Artificial sequence
  synthetic peptide
EARNRTLNLAKLTGCSRENETEIIKCLRNKDPQEILLNE

SEQ ID NO: 19447 - protein, 39 aa, Artificial sequence
  synthetic peptide
ARNRTLNLAKLTGCSRENETEIIKCLRNKDPQEILLNEA

SEQ ID NO: 19448 - protein, 39 aa, Artificial sequence
  synthetic peptide
RNRTLNLAKLTGCSRENETEIIKCLRNKDPQEILLNEAF

SEQ ID NO: 19449 - protein, 39 aa, Artificial sequence
  synthetic peptide
NRTLNLAKLTGCSRENETEIIKCLRNKDPQEILLNEAFV

SEQ ID NO: 19450 - protein, 39 aa, Artificial sequence
  synthetic peptide
RTLNLAKLTGCSRENETEIIKCLRNKDPQEILLNEAFVV

SEQ ID NO: 19451 - protein, 39 aa, Artificial sequence
  synthetic peptide
TLNLAKLTGCSRENETEIIKCLRNKDPQEILLNEAFVVP

SEQ ID NO: 19452 - protein, 39 aa, Artificial sequence
  synthetic peptide
LNLAKLTGCSRENETEIIKCLRNKDPQEILLNEAFVVPY

SEQ ID NO: 19453 - protein, 39 aa, Artificial sequence
  synthetic peptide
NLAKLTGCSRENETEIIKCLRNKDPQEILLNEAFVVPYG

SEQ ID NO: 19454 - protein, 39 aa, Artificial sequence
  synthetic peptide
LAKLTGCSRENETEIIKCLRNKDPQEILLNEAFVVPYGT

SEQ ID NO: 19455 - protein, 39 aa, Artificial sequence
  synthetic peptide
AKLTGCSRENETEIIKCLRNKDPQEILLNEAFVVPYGTP

SEQ ID NO: 19456 - protein, 39 aa, Artificial sequence
  synthetic peptide
KLTGCSRENETEIIKCLRNKDPQEILLNEAFVVPYGTPL

SEQ ID NO: 19457 - protein, 39 aa, Artificial sequence
  synthetic peptide
LTGCSRENETEIIKCLRNKDPQEILLNEAFVVPYGTPLS

SEQ ID NO: 19458 - protein, 39 aa, Artificial sequence
  synthetic peptide
TGCSRENETEIIKCLRNKDPQEILLNEAFVVPYGTPLSV

SEQ ID NO: 19459 - protein, 39 aa, Artificial sequence
  synthetic peptide
GCSRENETEIIKCLRNKDPQEILLNEAFVVPYGTPLSVN

SEQ ID NO: 19460 - protein, 39 aa, Artificial sequence
  synthetic peptide
CSRENETEIIKCLRNKDPQEILLNEAFVVPYGTPLSVNF

SEQ ID NO: 19461 - protein, 39 aa, Artificial sequence
  synthetic peptide
SRENETEIIKCLRNKDPQEILLNEAFVVPYGTPLSVNFG

SEQ ID NO: 19462 - protein, 39 aa, Artificial sequence
  synthetic peptide
RENETEIIKCLRNKDPQEILLNEAFVVPYGTPLSVNFGP

SEQ ID NO: 19463 - protein, 39 aa, Artificial sequence
  synthetic peptide
ENETEIIKCLRNKDPQEILLNEAFVVPYGTPLSVNFGPT

SEQ ID NO: 19464 - protein, 39 aa, Artificial sequence
  synthetic peptide
NETEIIKCLRNKDPQEILLNEAFVVPYGTPLSVNFGPTV

SEQ ID NO: 19465 - protein, 39 aa, Artificial sequence
  synthetic peptide
ETEIIKCLRNKDPQEILLNEAFVVPYGTPLSVNFGPTVD

SEQ ID NO: 19466 - protein, 39 aa, Artificial sequence
  synthetic peptide
TEIIKCLRNKDPQEILLNEAFVVPYGTPLSVNFGPTVDG

SEQ ID NO: 19467 - protein, 39 aa, Artificial sequence
  synthetic peptide
EIIKCLRNKDPQEILLNEAFVVPYGTPLSVNFGPTVDGD

SEQ ID NO: 19468 - protein, 39 aa, Artificial sequence
  synthetic peptide
IIKCLRNKDPQEILLNEAFVVPYGTPLSVNFGPTVDGDF

SEQ ID NO: 19469 - protein, 39 aa, Artificial sequence
  synthetic peptide
IKCLRNKDPQEILLNEAFVVPYGTPLSVNFGPTVDGDFL

SEQ ID NO: 19470 - protein, 39 aa, Artificial sequence
  synthetic peptide
KCLRNKDPQEILLNEAFVVPYGTPLSVNFGPTVDGDFLT

SEQ ID NO: 19471 - protein, 39 aa, Artificial sequence
  synthetic peptide
CLRNKDPQEILLNEAFVVPYGTPLSVNFGPTVDGDFLTD

SEQ ID NO: 19472 - protein, 39 aa, Artificial sequence
  synthetic peptide
LRNKDPQEILLNEAFVVPYGTPLSVNFGPTVDGDFLTDM

SEQ ID NO: 19473 - protein, 39 aa, Artificial sequence
  synthetic peptide
RNKDPQEILLNEAFVVPYGTPLSVNFGPTVDGDFLTDMP

SEQ ID NO: 19474 - protein, 39 aa, Artificial sequence
  synthetic peptide
NKDPQEILLNEAFVVPYGTPLSVNFGPTVDGDFLTDMPD

SEQ ID NO: 19475 - protein, 39 aa, Artificial sequence
  synthetic peptide
KDPQEILLNEAFVVPYGTPLSVNFGPTVDGDFLTDMPDI

SEQ ID NO: 19476 - protein, 39 aa, Artificial sequence
  synthetic peptide
DPQEILLNEAFVVPYGTPLSVNFGPTVDGDFLTDMPDIL

SEQ ID NO: 19477 - protein, 39 aa, Artificial sequence
  synthetic peptide
PQEILLNEAFVVPYGTPLSVNFGPTVDGDFLTDMPDILL

SEQ ID NO: 19478 - protein, 39 aa, Artificial sequence
  synthetic peptide
QEILLNEAFVVPYGTPLSVNFGPTVDGDFLTDMPDILLE

SEQ ID NO: 19479 - protein, 39 aa, Artificial sequence
  synthetic peptide
EILLNEAFVVPYGTPLSVNFGPTVDGDFLTDMPDILLEL

SEQ ID NO: 19480 - protein, 39 aa, Artificial sequence
  synthetic peptide
ILLNEAFVVPYGTPLSVNFGPTVDGDFLTDMPDILLELG

SEQ ID NO: 19481 - protein, 39 aa, Artificial sequence
  synthetic peptide
LLNEAFVVPYGTPLSVNFGPTVDGDFLTDMPDILLELGQ

SEQ ID NO: 19482 - protein, 39 aa, Artificial sequence
  synthetic peptide
LNEAFVVPYGTPLSVNFGPTVDGDFLTDMPDILLELGQF

SEQ ID NO: 19483 - protein, 39 aa, Artificial sequence
  synthetic peptide
NEAFVVPYGTPLSVNFGPTVDGDFLTDMPDILLELGQFK

SEQ ID NO: 19484 - protein, 39 aa, Artificial sequence
  synthetic peptide
EAFVVPYGTPLSVNFGPTVDGDFLTDMPDILLELGQFKK

SEQ ID NO: 19485 - protein, 39 aa, Artificial sequence
  synthetic peptide
AFVVPYGTPLSVNFGPTVDGDFLTDMPDILLELGQFKKT

SEQ ID NO: 19486 - protein, 39 aa, Artificial sequence
  synthetic peptide
FVVPYGTPLSVNFGPTVDGDFLTDMPDILLELGQFKKTQ

SEQ ID NO: 19487 - protein, 39 aa, Artificial sequence
  synthetic peptide
VVPYGTPLSVNFGPTVDGDFLTDMPDILLELGQFKKTQI

SEQ ID NO: 19488 - protein, 39 aa, Artificial sequence
  synthetic peptide
VPYGTPLSVNFGPTVDGDFLTDMPDILLELGQFKKTQIL

SEQ ID NO: 19489 - protein, 39 aa, Artificial sequence
  synthetic peptide
PYGTPLSVNFGPTVDGDFLTDMPDILLELGQFKKTQILV

SEQ ID NO: 19490 - protein, 39 aa, Artificial sequence
  synthetic peptide
YGTPLSVNFGPTVDGDFLTDMPDILLELGQFKKTQILVG

SEQ ID NO: 19491 - protein, 39 aa, Artificial sequence
  synthetic peptide
GTPLSVNFGPTVDGDFLTDMPDILLELGQFKKTQILVGV

SEQ ID NO: 19492 - protein, 39 aa, Artificial sequence
  synthetic peptide
TPLSVNFGPTVDGDFLTDMPDILLELGQFKKTQILVGVN

SEQ ID NO: 19493 - protein, 39 aa, Artificial sequence
  synthetic peptide
PLSVNFGPTVDGDFLTDMPDILLELGQFKKTQILVGVNK

SEQ ID NO: 19494 - protein, 39 aa, Artificial sequence
  synthetic peptide
LSVNFGPTVDGDFLTDMPDILLELGQFKKTQILVGVNKD

SEQ ID NO: 19495 - protein, 39 aa, Artificial sequence
  synthetic peptide
SVNFGPTVDGDFLTDMPDILLELGQFKKTQILVGVNKDE

SEQ ID NO: 19496 - protein, 39 aa, Artificial sequence
  synthetic peptide
VNFGPTVDGDFLTDMPDILLELGQFKKTQILVGVNKDEG

SEQ ID NO: 19497 - protein, 39 aa, Artificial sequence
  synthetic peptide
NFGPTVDGDFLTDMPDILLELGQFKKTQILVGVNKDEGT

SEQ ID NO: 19498 - protein, 39 aa, Artificial sequence
  synthetic peptide
FGPTVDGDFLTDMPDILLELGQFKKTQILVGVNKDEGTA

SEQ ID NO: 19499 - protein, 39 aa, Artificial sequence
  synthetic peptide
GPTVDGDFLTDMPDILLELGQFKKTQILVGVNKDEGTAF

SEQ ID NO: 19500 - protein, 39 aa, Artificial sequence
  synthetic peptide
PTVDGDFLTDMPDILLELGQFKKTQILVGVNKDEGTAFL

SEQ ID NO: 19501 - protein, 39 aa, Artificial sequence
  synthetic peptide
TVDGDFLTDMPDILLELGQFKKTQILVGVNKDEGTAFLV

SEQ ID NO: 19502 - protein, 39 aa, Artificial sequence
  synthetic peptide
VDGDFLTDMPDILLELGQFKKTQILVGVNKDEGTAFLVY

SEQ ID NO: 19503 - protein, 39 aa, Artificial sequence
  synthetic peptide
DGDFLTDMPDILLELGQFKKTQILVGVNKDEGTAFLVYG

SEQ ID NO: 19504 - protein, 39 aa, Artificial sequence
  synthetic peptide
GDFLTDMPDILLELGQFKKTQILVGVNKDEGTAFLVYGA

SEQ ID NO: 19505 - protein, 39 aa, Artificial sequence
  synthetic peptide
DFLTDMPDILLELGQFKKTQILVGVNKDEGTAFLVYGAP

SEQ ID NO: 19506 - protein, 39 aa, Artificial sequence
  synthetic peptide
FLTDMPDILLELGQFKKTQILVGVNKDEGTAFLVYGAPG

SEQ ID NO: 19507 - protein, 39 aa, Artificial sequence
  synthetic peptide
LTDMPDILLELGQFKKTQILVGVNKDEGTAFLVYGAPGF

SEQ ID NO: 19508 - protein, 39 aa, Artificial sequence
  synthetic peptide
TDMPDILLELGQFKKTQILVGVNKDEGTAFLVYGAPGFS

SEQ ID NO: 19509 - protein, 39 aa, Artificial sequence
  synthetic peptide
DMPDILLELGQFKKTQILVGVNKDEGTAFLVYGAPGFSK

SEQ ID NO: 19510 - protein, 39 aa, Artificial sequence
  synthetic peptide
MPDILLELGQFKKTQILVGVNKDEGTAFLVYGAPGFSKD

SEQ ID NO: 19511 - protein, 39 aa, Artificial sequence
  synthetic peptide
PDILLELGQFKKTQILVGVNKDEGTAFLVYGAPGFSKDN

SEQ ID NO: 19512 - protein, 39 aa, Artificial sequence
  synthetic peptide
DILLELGQFKKTQILVGVNKDEGTAFLVYGAPGFSKDNN

SEQ ID NO: 19513 - protein, 39 aa, Artificial sequence
  synthetic peptide
ILLELGQFKKTQILVGVNKDEGTAFLVYGAPGFSKDNNS

SEQ ID NO: 19514 - protein, 39 aa, Artificial sequence
  synthetic peptide
LLELGQFKKTQILVGVNKDEGTAFLVYGAPGFSKDNNSI

SEQ ID NO: 19515 - protein, 39 aa, Artificial sequence
  synthetic peptide
LELGQFKKTQILVGVNKDEGTAFLVYGAPGFSKDNNSII

SEQ ID NO: 19516 - protein, 39 aa, Artificial sequence
  synthetic peptide
ELGQFKKTQILVGVNKDEGTAFLVYGAPGFSKDNNSIIT

SEQ ID NO: 19517 - protein, 39 aa, Artificial sequence
  synthetic peptide
LGQFKKTQILVGVNKDEGTAFLVYGAPGFSKDNNSIITR

SEQ ID NO: 19518 - protein, 39 aa, Artificial sequence
  synthetic peptide
GQFKKTQILVGVNKDEGTAFLVYGAPGFSKDNNSIITRK

SEQ ID NO: 19519 - protein, 39 aa, Artificial sequence
  synthetic peptide
QFKKTQILVGVNKDEGTAFLVYGAPGFSKDNNSIITRKE

SEQ ID NO: 19520 - protein, 39 aa, Artificial sequence
  synthetic peptide
FKKTQILVGVNKDEGTAFLVYGAPGFSKDNNSIITRKEF

SEQ ID NO: 19521 - protein, 39 aa, Artificial sequence
  synthetic peptide
KKTQILVGVNKDEGTAFLVYGAPGFSKDNNSIITRKEFQ

SEQ ID NO: 19522 - protein, 39 aa, Artificial sequence
  synthetic peptide
KTQILVGVNKDEGTAFLVYGAPGFSKDNNSIITRKEFQE

SEQ ID NO: 19523 - protein, 39 aa, Artificial sequence
  synthetic peptide
TQILVGVNKDEGTAFLVYGAPGFSKDNNSIITRKEFQEG

SEQ ID NO: 19524 - protein, 39 aa, Artificial sequence
  synthetic peptide
QILVGVNKDEGTAFLVYGAPGFSKDNNSIITRKEFQEGL

SEQ ID NO: 19525 - protein, 39 aa, Artificial sequence
  synthetic peptide
ILVGVNKDEGTAFLVYGAPGFSKDNNSIITRKEFQEGLK

SEQ ID NO: 19526 - protein, 39 aa, Artificial sequence
  synthetic peptide
LVGVNKDEGTAFLVYGAPGFSKDNNSIITRKEFQEGLKI

SEQ ID NO: 19527 - protein, 39 aa, Artificial sequence
  synthetic peptide
VGVNKDEGTAFLVYGAPGFSKDNNSIITRKEFQEGLKIF

SEQ ID NO: 19528 - protein, 39 aa, Artificial sequence
  synthetic peptide
GVNKDEGTAFLVYGAPGFSKDNNSIITRKEFQEGLKIFF

SEQ ID NO: 19529 - protein, 39 aa, Artificial sequence
  synthetic peptide
VNKDEGTAFLVYGAPGFSKDNNSIITRKEFQEGLKIFFP

SEQ ID NO: 19530 - protein, 39 aa, Artificial sequence
  synthetic peptide
NKDEGTAFLVYGAPGFSKDNNSIITRKEFQEGLKIFFPG

SEQ ID NO: 19531 - protein, 39 aa, Artificial sequence
  synthetic peptide
KDEGTAFLVYGAPGFSKDNNSIITRKEFQEGLKIFFPGV

SEQ ID NO: 19532 - protein, 39 aa, Artificial sequence
  synthetic peptide
DEGTAFLVYGAPGFSKDNNSIITRKEFQEGLKIFFPGVS

SEQ ID NO: 19533 - protein, 39 aa, Artificial sequence
  synthetic peptide
EGTAFLVYGAPGFSKDNNSIITRKEFQEGLKIFFPGVSE

SEQ ID NO: 19534 - protein, 39 aa, Artificial sequence
  synthetic peptide
GTAFLVYGAPGFSKDNNSIITRKEFQEGLKIFFPGVSEF

SEQ ID NO: 19535 - protein, 39 aa, Artificial sequence
  synthetic peptide
TAFLVYGAPGFSKDNNSIITRKEFQEGLKIFFPGVSEFG

SEQ ID NO: 19536 - protein, 39 aa, Artificial sequence
  synthetic peptide
AFLVYGAPGFSKDNNSIITRKEFQEGLKIFFPGVSEFGK

SEQ ID NO: 19537 - protein, 39 aa, Artificial sequence
  synthetic peptide
FLVYGAPGFSKDNNSIITRKEFQEGLKIFFPGVSEFGKE

SEQ ID NO: 19538 - protein, 39 aa, Artificial sequence
  synthetic peptide
LVYGAPGFSKDNNSIITRKEFQEGLKIFFPGVSEFGKES

SEQ ID NO: 19539 - protein, 39 aa, Artificial sequence
  synthetic peptide
VYGAPGFSKDNNSIITRKEFQEGLKIFFPGVSEFGKESI

SEQ ID NO: 19540 - protein, 39 aa, Artificial sequence
  synthetic peptide
YGAPGFSKDNNSIITRKEFQEGLKIFFPGVSEFGKESIL

SEQ ID NO: 19541 - protein, 39 aa, Artificial sequence
  synthetic peptide
GAPGFSKDNNSIITRKEFQEGLKIFFPGVSEFGKESILF

SEQ ID NO: 19542 - protein, 39 aa, Artificial sequence
  synthetic peptide
APGFSKDNNSIITRKEFQEGLKIFFPGVSEFGKESILFH

SEQ ID NO: 19543 - protein, 39 aa, Artificial sequence
  synthetic peptide
PGFSKDNNSIITRKEFQEGLKIFFPGVSEFGKESILFHY

SEQ ID NO: 19544 - protein, 39 aa, Artificial sequence
  synthetic peptide
GFSKDNNSIITRKEFQEGLKIFFPGVSEFGKESILFHYT

SEQ ID NO: 19545 - protein, 39 aa, Artificial sequence
  synthetic peptide
FSKDNNSIITRKEFQEGLKIFFPGVSEFGKESILFHYTD

SEQ ID NO: 19546 - protein, 39 aa, Artificial sequence
  synthetic peptide
SKDNNSIITRKEFQEGLKIFFPGVSEFGKESILFHYTDW

SEQ ID NO: 19547 - protein, 39 aa, Artificial sequence
  synthetic peptide
KDNNSIITRKEFQEGLKIFFPGVSEFGKESILFHYTDWV

SEQ ID NO: 19548 - protein, 39 aa, Artificial sequence
  synthetic peptide
DNNSIITRKEFQEGLKIFFPGVSEFGKESILFHYTDWVD

SEQ ID NO: 19549 - protein, 39 aa, Artificial sequence
  synthetic peptide
NNSIITRKEFQEGLKIFFPGVSEFGKESILFHYTDWVDD

SEQ ID NO: 19550 - protein, 39 aa, Artificial sequence
  synthetic peptide
NSIITRKEFQEGLKIFFPGVSEFGKESILFHYTDWVDDQ

SEQ ID NO: 19551 - protein, 39 aa, Artificial sequence
  synthetic peptide
SIITRKEFQEGLKIFFPGVSEFGKESILFHYTDWVDDQR

SEQ ID NO: 19552 - protein, 39 aa, Artificial sequence
  synthetic peptide
IITRKEFQEGLKIFFPGVSEFGKESILFHYTDWVDDQRP

SEQ ID NO: 19553 - protein, 39 aa, Artificial sequence
  synthetic peptide
ITRKEFQEGLKIFFPGVSEFGKESILFHYTDWVDDQRPE

SEQ ID NO: 19554 - protein, 39 aa, Artificial sequence
  synthetic peptide
TRKEFQEGLKIFFPGVSEFGKESILFHYTDWVDDQRPEN

SEQ ID NO: 19555 - protein, 39 aa, Artificial sequence
  synthetic peptide
RKEFQEGLKIFFPGVSEFGKESILFHYTDWVDDQRPENY

SEQ ID NO: 19556 - protein, 39 aa, Artificial sequence
  synthetic peptide
KEFQEGLKIFFPGVSEFGKESILFHYTDWVDDQRPENYR

SEQ ID NO: 19557 - protein, 39 aa, Artificial sequence
  synthetic peptide
EFQEGLKIFFPGVSEFGKESILFHYTDWVDDQRPENYRE

SEQ ID NO: 19558 - protein, 39 aa, Artificial sequence
  synthetic peptide
FQEGLKIFFPGVSEFGKESILFHYTDWVDDQRPENYREA

SEQ ID NO: 19559 - protein, 39 aa, Artificial sequence
  synthetic peptide
QEGLKIFFPGVSEFGKESILFHYTDWVDDQRPENYREAL

SEQ ID NO: 19560 - protein, 39 aa, Artificial sequence
  synthetic peptide
EGLKIFFPGVSEFGKESILFHYTDWVDDQRPENYREALG

SEQ ID NO: 19561 - protein, 39 aa, Artificial sequence
  synthetic peptide
GLKIFFPGVSEFGKESILFHYTDWVDDQRPENYREALGD

SEQ ID NO: 19562 - protein, 39 aa, Artificial sequence
  synthetic peptide
LKIFFPGVSEFGKESILFHYTDWVDDQRPENYREALGDV

SEQ ID NO: 19563 - protein, 39 aa, Artificial sequence
  synthetic peptide
KIFFPGVSEFGKESILFHYTDWVDDQRPENYREALGDVV

SEQ ID NO: 19564 - protein, 39 aa, Artificial sequence
  synthetic peptide
IFFPGVSEFGKESILFHYTDWVDDQRPENYREALGDVVG

SEQ ID NO: 19565 - protein, 39 aa, Artificial sequence
  synthetic peptide
FFPGVSEFGKESILFHYTDWVDDQRPENYREALGDVVGD

SEQ ID NO: 19566 - protein, 39 aa, Artificial sequence
  synthetic peptide
FPGVSEFGKESILFHYTDWVDDQRPENYREALGDVVGDY

SEQ ID NO: 19567 - protein, 39 aa, Artificial sequence
  synthetic peptide
PGVSEFGKESILFHYTDWVDDQRPENYREALGDVVGDYN

SEQ ID NO: 19568 - protein, 39 aa, Artificial sequence
  synthetic peptide
GVSEFGKESILFHYTDWVDDQRPENYREALGDVVGDYNF

SEQ ID NO: 19569 - protein, 39 aa, Artificial sequence
  synthetic peptide
VSEFGKESILFHYTDWVDDQRPENYREALGDVVGDYNFI

SEQ ID NO: 19570 - protein, 39 aa, Artificial sequence
  synthetic peptide
SEFGKESILFHYTDWVDDQRPENYREALGDVVGDYNFIC

SEQ ID NO: 19571 - protein, 39 aa, Artificial sequence
  synthetic peptide
EFGKESILFHYTDWVDDQRPENYREALGDVVGDYNFICP

SEQ ID NO: 19572 - protein, 39 aa, Artificial sequence
  synthetic peptide
FGKESILFHYTDWVDDQRPENYREALGDVVGDYNFICPA

SEQ ID NO: 19573 - protein, 39 aa, Artificial sequence
  synthetic peptide
GKESILFHYTDWVDDQRPENYREALGDVVGDYNFICPAL

SEQ ID NO: 19574 - protein, 39 aa, Artificial sequence
  synthetic peptide
KESILFHYTDWVDDQRPENYREALGDVVGDYNFICPALE

SEQ ID NO: 19575 - protein, 39 aa, Artificial sequence
  synthetic peptide
ESILFHYTDWVDDQRPENYREALGDVVGDYNFICPALEF

SEQ ID NO: 19576 - protein, 39 aa, Artificial sequence
  synthetic peptide
SILFHYTDWVDDQRPENYREALGDVVGDYNFICPALEFT

SEQ ID NO: 19577 - protein, 39 aa, Artificial sequence
  synthetic peptide
ILFHYTDWVDDQRPENYREALGDVVGDYNFICPALEFTK

SEQ ID NO: 19578 - protein, 39 aa, Artificial sequence
  synthetic peptide
LFHYTDWVDDQRPENYREALGDVVGDYNFICPALEFTKK

SEQ ID NO: 19579 - protein, 39 aa, Artificial sequence
  synthetic peptide
FHYTDWVDDQRPENYREALGDVVGDYNFICPALEFTKKF

SEQ ID NO: 19580 - protein, 39 aa, Artificial sequence
  synthetic peptide
HYTDWVDDQRPENYREALGDVVGDYNFICPALEFTKKFS

SEQ ID NO: 19581 - protein, 39 aa, Artificial sequence
  synthetic peptide
YTDWVDDQRPENYREALGDVVGDYNFICPALEFTKKFSE

SEQ ID NO: 19582 - protein, 39 aa, Artificial sequence
  synthetic peptide
TDWVDDQRPENYREALGDVVGDYNFICPALEFTKKFSEW

SEQ ID NO: 19583 - protein, 39 aa, Artificial sequence
  synthetic peptide
DWVDDQRPENYREALGDVVGDYNFICPALEFTKKFSEWG

SEQ ID NO: 19584 - protein, 39 aa, Artificial sequence
  synthetic peptide
WVDDQRPENYREALGDVVGDYNFICPALEFTKKFSEWGN

SEQ ID NO: 19585 - protein, 39 aa, Artificial sequence
  synthetic peptide
VDDQRPENYREALGDVVGDYNFICPALEFTKKFSEWGNN

SEQ ID NO: 19586 - protein, 39 aa, Artificial sequence
  synthetic peptide
DDQRPENYREALGDVVGDYNFICPALEFTKKFSEWGNNA

SEQ ID NO: 19587 - protein, 39 aa, Artificial sequence
  synthetic peptide
DQRPENYREALGDVVGDYNFICPALEFTKKFSEWGNNAF

SEQ ID NO: 19588 - protein, 39 aa, Artificial sequence
  synthetic peptide
QRPENYREALGDVVGDYNFICPALEFTKKFSEWGNNAFF

SEQ ID NO: 19589 - protein, 39 aa, Artificial sequence
  synthetic peptide
RPENYREALGDVVGDYNFICPALEFTKKFSEWGNNAFFY

SEQ ID NO: 19590 - protein, 39 aa, Artificial sequence
  synthetic peptide
PENYREALGDVVGDYNFICPALEFTKKFSEWGNNAFFYY

SEQ ID NO: 19591 - protein, 39 aa, Artificial sequence
  synthetic peptide
ENYREALGDVVGDYNFICPALEFTKKFSEWGNNAFFYYF

SEQ ID NO: 19592 - protein, 39 aa, Artificial sequence
  synthetic peptide
NYREALGDVVGDYNFICPALEFTKKFSEWGNNAFFYYFE

SEQ ID NO: 19593 - protein, 39 aa, Artificial sequence
  synthetic peptide
YREALGDVVGDYNFICPALEFTKKFSEWGNNAFFYYFEH

SEQ ID NO: 19594 - protein, 39 aa, Artificial sequence
  synthetic peptide
REALGDVVGDYNFICPALEFTKKFSEWGNNAFFYYFEHR

SEQ ID NO: 19595 - protein, 39 aa, Artificial sequence
  synthetic peptide
EALGDVVGDYNFICPALEFTKKFSEWGNNAFFYYFEHRS

SEQ ID NO: 19596 - protein, 39 aa, Artificial sequence
  synthetic peptide
ALGDVVGDYNFICPALEFTKKFSEWGNNAFFYYFEHRSS

SEQ ID NO: 19597 - protein, 39 aa, Artificial sequence
  synthetic peptide
LGDVVGDYNFICPALEFTKKFSEWGNNAFFYYFEHRSSK

SEQ ID NO: 19598 - protein, 39 aa, Artificial sequence
  synthetic peptide
GDVVGDYNFICPALEFTKKFSEWGNNAFFYYFEHRSSKL

SEQ ID NO: 19599 - protein, 39 aa, Artificial sequence
  synthetic peptide
DVVGDYNFICPALEFTKKFSEWGNNAFFYYFEHRSSKLP

SEQ ID NO: 19600 - protein, 39 aa, Artificial sequence
  synthetic peptide
VVGDYNFICPALEFTKKFSEWGNNAFFYYFEHRSSKLPW

SEQ ID NO: 19601 - protein, 39 aa, Artificial sequence
  synthetic peptide
VGDYNFICPALEFTKKFSEWGNNAFFYYFEHRSSKLPWP

SEQ ID NO: 19602 - protein, 39 aa, Artificial sequence
  synthetic peptide
GDYNFICPALEFTKKFSEWGNNAFFYYFEHRSSKLPWPE

SEQ ID NO: 19603 - protein, 39 aa, Artificial sequence
  synthetic peptide
DYNFICPALEFTKKFSEWGNNAFFYYFEHRSSKLPWPEW

SEQ ID NO: 19604 - protein, 39 aa, Artificial sequence
  synthetic peptide
YNFICPALEFTKKFSEWGNNAFFYYFEHRSSKLPWPEWM

SEQ ID NO: 19605 - protein, 39 aa, Artificial sequence
  synthetic peptide
NFICPALEFTKKFSEWGNNAFFYYFEHRSSKLPWPEWMG

SEQ ID NO: 19606 - protein, 39 aa, Artificial sequence
  synthetic peptide
FICPALEFTKKFSEWGNNAFFYYFEHRSSKLPWPEWMGV

SEQ ID NO: 19607 - protein, 39 aa, Artificial sequence
  synthetic peptide
ICPALEFTKKFSEWGNNAFFYYFEHRSSKLPWPEWMGVM

SEQ ID NO: 19608 - protein, 39 aa, Artificial sequence
  synthetic peptide
CPALEFTKKFSEWGNNAFFYYFEHRSSKLPWPEWMGVMH

SEQ ID NO: 19609 - protein, 39 aa, Artificial sequence
  synthetic peptide
PALEFTKKFSEWGNNAFFYYFEHRSSKLPWPEWMGVMHG

SEQ ID NO: 19610 - protein, 39 aa, Artificial sequence
  synthetic peptide
ALEFTKKFSEWGNNAFFYYFEHRSSKLPWPEWMGVMHGY

SEQ ID NO: 19611 - protein, 39 aa, Artificial sequence
  synthetic peptide
LEFTKKFSEWGNNAFFYYFEHRSSKLPWPEWMGVMHGYE

SEQ ID NO: 19612 - protein, 39 aa, Artificial sequence
  synthetic peptide
EFTKKFSEWGNNAFFYYFEHRSSKLPWPEWMGVMHGYEI

SEQ ID NO: 19613 - protein, 39 aa, Artificial sequence
  synthetic peptide
FTKKFSEWGNNAFFYYFEHRSSKLPWPEWMGVMHGYEIE

SEQ ID NO: 19614 - protein, 39 aa, Artificial sequence
  synthetic peptide
TKKFSEWGNNAFFYYFEHRSSKLPWPEWMGVMHGYEIEF

SEQ ID NO: 19615 - protein, 39 aa, Artificial sequence
  synthetic peptide
KKFSEWGNNAFFYYFEHRSSKLPWPEWMGVMHGYEIEFV

SEQ ID NO: 19616 - protein, 39 aa, Artificial sequence
  synthetic peptide
KFSEWGNNAFFYYFEHRSSKLPWPEWMGVMHGYEIEFVF

SEQ ID NO: 19617 - protein, 39 aa, Artificial sequence
  synthetic peptide
FSEWGNNAFFYYFEHRSSKLPWPEWMGVMHGYEIEFVFG

SEQ ID NO: 19618 - protein, 39 aa, Artificial sequence
  synthetic peptide
SEWGNNAFFYYFEHRSSKLPWPEWMGVMHGYEIEFVFGL

SEQ ID NO: 19619 - protein, 39 aa, Artificial sequence
  synthetic peptide
EWGNNAFFYYFEHRSSKLPWPEWMGVMHGYEIEFVFGLP

SEQ ID NO: 19620 - protein, 39 aa, Artificial sequence
  synthetic peptide
WGNNAFFYYFEHRSSKLPWPEWMGVMHGYEIEFVFGLPL

SEQ ID NO: 19621 - protein, 39 aa, Artificial sequence
  synthetic peptide
GNNAFFYYFEHRSSKLPWPEWMGVMHGYEIEFVFGLPLE

SEQ ID NO: 19622 - protein, 39 aa, Artificial sequence
  synthetic peptide
NNAFFYYFEHRSSKLPWPEWMGVMHGYEIEFVFGLPLER

SEQ ID NO: 19623 - protein, 39 aa, Artificial sequence
  synthetic peptide
NAFFYYFEHRSSKLPWPEWMGVMHGYEIEFVFGLPLERR

SEQ ID NO: 19624 - protein, 39 aa, Artificial sequence
  synthetic peptide
AFFYYFEHRSSKLPWPEWMGVMHGYEIEFVFGLPLERRD

SEQ ID NO: 19625 - protein, 39 aa, Artificial sequence
  synthetic peptide
FFYYFEHRSSKLPWPEWMGVMHGYEIEFVFGLPLERRDN

SEQ ID NO: 19626 - protein, 39 aa, Artificial sequence
  synthetic peptide
FYYFEHRSSKLPWPEWMGVMHGYEIEFVFGLPLERRDNY

SEQ ID NO: 19627 - protein, 39 aa, Artificial sequence
  synthetic peptide
YYFEHRSSKLPWPEWMGVMHGYEIEFVFGLPLERRDNYT

SEQ ID NO: 19628 - protein, 39 aa, Artificial sequence
  synthetic peptide
YFEHRSSKLPWPEWMGVMHGYEIEFVFGLPLERRDNYTK

SEQ ID NO: 19629 - protein, 39 aa, Artificial sequence
  synthetic peptide
FEHRSSKLPWPEWMGVMHGYEIEFVFGLPLERRDNYTKA

SEQ ID NO: 19630 - protein, 39 aa, Artificial sequence
  synthetic peptide
EHRSSKLPWPEWMGVMHGYEIEFVFGLPLERRDNYTKAE

SEQ ID NO: 19631 - protein, 39 aa, Artificial sequence
  synthetic peptide
HRSSKLPWPEWMGVMHGYEIEFVFGLPLERRDNYTKAEE

SEQ ID NO: 19632 - protein, 39 aa, Artificial sequence
  synthetic peptide
RSSKLPWPEWMGVMHGYEIEFVFGLPLERRDNYTKAEEI

SEQ ID NO: 19633 - protein, 39 aa, Artificial sequence
  synthetic peptide
SSKLPWPEWMGVMHGYEIEFVFGLPLERRDNYTKAEEIL

SEQ ID NO: 19634 - protein, 39 aa, Artificial sequence
  synthetic peptide
SKLPWPEWMGVMHGYEIEFVFGLPLERRDNYTKAEEILS

SEQ ID NO: 19635 - protein, 39 aa, Artificial sequence
  synthetic peptide
KLPWPEWMGVMHGYEIEFVFGLPLERRDNYTKAEEILSR

SEQ ID NO: 19636 - protein, 39 aa, Artificial sequence
  synthetic peptide
LPWPEWMGVMHGYEIEFVFGLPLERRDNYTKAEEILSRS

SEQ ID NO: 19637 - protein, 39 aa, Artificial sequence
  synthetic peptide
PWPEWMGVMHGYEIEFVFGLPLERRDNYTKAEEILSRSI

SEQ ID NO: 19638 - protein, 39 aa, Artificial sequence
  synthetic peptide
WPEWMGVMHGYEIEFVFGLPLERRDNYTKAEEILSRSIV

SEQ ID NO: 19639 - protein, 39 aa, Artificial sequence
  synthetic peptide
PEWMGVMHGYEIEFVFGLPLERRDNYTKAEEILSRSIVK

SEQ ID NO: 19640 - protein, 39 aa, Artificial sequence
  synthetic peptide
EWMGVMHGYEIEFVFGLPLERRDNYTKAEEILSRSIVKR

SEQ ID NO: 19641 - protein, 39 aa, Artificial sequence
  synthetic peptide
WMGVMHGYEIEFVFGLPLERRDNYTKAEEILSRSIVKRW

SEQ ID NO: 19642 - protein, 39 aa, Artificial sequence
  synthetic peptide
MGVMHGYEIEFVFGLPLERRDNYTKAEEILSRSIVKRWA

SEQ ID NO: 19643 - protein, 39 aa, Artificial sequence
  synthetic peptide
GVMHGYEIEFVFGLPLERRDNYTKAEEILSRSIVKRWAN

SEQ ID NO: 19644 - protein, 39 aa, Artificial sequence
  synthetic peptide
VMHGYEIEFVFGLPLERRDNYTKAEEILSRSIVKRWANF

SEQ ID NO: 19645 - protein, 39 aa, Artificial sequence
  synthetic peptide
MHGYEIEFVFGLPLERRDNYTKAEEILSRSIVKRWANFA

SEQ ID NO: 19646 - protein, 39 aa, Artificial sequence
  synthetic peptide
HGYEIEFVFGLPLERRDNYTKAEEILSRSIVKRWANFAK

SEQ ID NO: 19647 - protein, 39 aa, Artificial sequence
  synthetic peptide
GYEIEFVFGLPLERRDNYTKAEEILSRSIVKRWANFAKY

SEQ ID NO: 19648 - protein, 39 aa, Artificial sequence
  synthetic peptide
YEIEFVFGLPLERRDNYTKAEEILSRSIVKRWANFAKYG

SEQ ID NO: 19649 - protein, 39 aa, Artificial sequence
  synthetic peptide
EIEFVFGLPLERRDNYTKAEEILSRSIVKRWANFAKYGN

SEQ ID NO: 19650 - protein, 39 aa, Artificial sequence
  synthetic peptide
IEFVFGLPLERRDNYTKAEEILSRSIVKRWANFAKYGNP

SEQ ID NO: 19651 - protein, 39 aa, Artificial sequence
  synthetic peptide
EFVFGLPLERRDNYTKAEEILSRSIVKRWANFAKYGNPN

SEQ ID NO: 19652 - protein, 39 aa, Artificial sequence
  synthetic peptide
FVFGLPLERRDNYTKAEEILSRSIVKRWANFAKYGNPNE

SEQ ID NO: 19653 - protein, 39 aa, Artificial sequence
  synthetic peptide
VFGLPLERRDNYTKAEEILSRSIVKRWANFAKYGNPNET

SEQ ID NO: 19654 - protein, 39 aa, Artificial sequence
  synthetic peptide
FGLPLERRDNYTKAEEILSRSIVKRWANFAKYGNPNETQ

SEQ ID NO: 19655 - protein, 39 aa, Artificial sequence
  synthetic peptide
GLPLERRDNYTKAEEILSRSIVKRWANFAKYGNPNETQN

SEQ ID NO: 19656 - protein, 39 aa, Artificial sequence
  synthetic peptide
LPLERRDNYTKAEEILSRSIVKRWANFAKYGNPNETQNN

SEQ ID NO: 19657 - protein, 39 aa, Artificial sequence
  synthetic peptide
PLERRDNYTKAEEILSRSIVKRWANFAKYGNPNETQNNS

SEQ ID NO: 19658 - protein, 39 aa, Artificial sequence
  synthetic peptide
LERRDNYTKAEEILSRSIVKRWANFAKYGNPNETQNNST

SEQ ID NO: 19659 - protein, 39 aa, Artificial sequence
  synthetic peptide
ERRDNYTKAEEILSRSIVKRWANFAKYGNPNETQNNSTS

SEQ ID NO: 19660 - protein, 39 aa, Artificial sequence
  synthetic peptide
RRDNYTKAEEILSRSIVKRWANFAKYGNPNETQNNSTSW

SEQ ID NO: 19661 - protein, 39 aa, Artificial sequence
  synthetic peptide
RDNYTKAEEILSRSIVKRWANFAKYGNPNETQNNSTSWP

SEQ ID NO: 19662 - protein, 39 aa, Artificial sequence
  synthetic peptide
DNYTKAEEILSRSIVKRWANFAKYGNPNETQNNSTSWPV

SEQ ID NO: 19663 - protein, 39 aa, Artificial sequence
  synthetic peptide
NYTKAEEILSRSIVKRWANFAKYGNPNETQNNSTSWPVF

SEQ ID NO: 19664 - protein, 39 aa, Artificial sequence
  synthetic peptide
YTKAEEILSRSIVKRWANFAKYGNPNETQNNSTSWPVFK

SEQ ID NO: 19665 - protein, 39 aa, Artificial sequence
  synthetic peptide
TKAEEILSRSIVKRWANFAKYGNPNETQNNSTSWPVFKS

SEQ ID NO: 19666 - protein, 39 aa, Artificial sequence
  synthetic peptide
KAEEILSRSIVKRWANFAKYGNPNETQNNSTSWPVFKST

SEQ ID NO: 19667 - protein, 39 aa, Artificial sequence
  synthetic peptide
AEEILSRSIVKRWANFAKYGNPNETQNNSTSWPVFKSTE

SEQ ID NO: 19668 - protein, 39 aa, Artificial sequence
  synthetic peptide
EEILSRSIVKRWANFAKYGNPNETQNNSTSWPVFKSTEQ

SEQ ID NO: 19669 - protein, 39 aa, Artificial sequence
  synthetic peptide
EILSRSIVKRWANFAKYGNPNETQNNSTSWPVFKSTEQK

SEQ ID NO: 19670 - protein, 39 aa, Artificial sequence
  synthetic peptide
ILSRSIVKRWANFAKYGNPNETQNNSTSWPVFKSTEQKY

SEQ ID NO: 19671 - protein, 39 aa, Artificial sequence
  synthetic peptide
LSRSIVKRWANFAKYGNPNETQNNSTSWPVFKSTEQKYL

SEQ ID NO: 19672 - protein, 39 aa, Artificial sequence
  synthetic peptide
SRSIVKRWANFAKYGNPNETQNNSTSWPVFKSTEQKYLT

SEQ ID NO: 19673 - protein, 39 aa, Artificial sequence
  synthetic peptide
RSIVKRWANFAKYGNPNETQNNSTSWPVFKSTEQKYLTL

SEQ ID NO: 19674 - protein, 39 aa, Artificial sequence
  synthetic peptide
SIVKRWANFAKYGNPNETQNNSTSWPVFKSTEQKYLTLN

SEQ ID NO: 19675 - protein, 39 aa, Artificial sequence
  synthetic peptide
IVKRWANFAKYGNPNETQNNSTSWPVFKSTEQKYLTLNT

SEQ ID NO: 19676 - protein, 39 aa, Artificial sequence
  synthetic peptide
VKRWANFAKYGNPNETQNNSTSWPVFKSTEQKYLTLNTE

SEQ ID NO: 19677 - protein, 39 aa, Artificial sequence
  synthetic peptide
KRWANFAKYGNPNETQNNSTSWPVFKSTEQKYLTLNTES

SEQ ID NO: 19678 - protein, 39 aa, Artificial sequence
  synthetic peptide
RWANFAKYGNPNETQNNSTSWPVFKSTEQKYLTLNTEST

SEQ ID NO: 19679 - protein, 39 aa, Artificial sequence
  synthetic peptide
WANFAKYGNPNETQNNSTSWPVFKSTEQKYLTLNTESTR

SEQ ID NO: 19680 - protein, 39 aa, Artificial sequence
  synthetic peptide
ANFAKYGNPNETQNNSTSWPVFKSTEQKYLTLNTESTRI

SEQ ID NO: 19681 - protein, 39 aa, Artificial sequence
  synthetic peptide
NFAKYGNPNETQNNSTSWPVFKSTEQKYLTLNTESTRIM

SEQ ID NO: 19682 - protein, 39 aa, Artificial sequence
  synthetic peptide
FAKYGNPNETQNNSTSWPVFKSTEQKYLTLNTESTRIMT

SEQ ID NO: 19683 - protein, 39 aa, Artificial sequence
  synthetic peptide
AKYGNPNETQNNSTSWPVFKSTEQKYLTLNTESTRIMTK

SEQ ID NO: 19684 - protein, 39 aa, Artificial sequence
  synthetic peptide
KYGNPNETQNNSTSWPVFKSTEQKYLTLNTESTRIMTKL

SEQ ID NO: 19685 - protein, 39 aa, Artificial sequence
  synthetic peptide
YGNPNETQNNSTSWPVFKSTEQKYLTLNTESTRIMTKLR

SEQ ID NO: 19686 - protein, 39 aa, Artificial sequence
  synthetic peptide
GNPNETQNNSTSWPVFKSTEQKYLTLNTESTRIMTKLRA

SEQ ID NO: 19687 - protein, 39 aa, Artificial sequence
  synthetic peptide
NPNETQNNSTSWPVFKSTEQKYLTLNTESTRIMTKLRAQ

SEQ ID NO: 19688 - protein, 39 aa, Artificial sequence
  synthetic peptide
PNETQNNSTSWPVFKSTEQKYLTLNTESTRIMTKLRAQQ

SEQ ID NO: 19689 - protein, 39 aa, Artificial sequence
  synthetic peptide
NETQNNSTSWPVFKSTEQKYLTLNTESTRIMTKLRAQQC

SEQ ID NO: 19690 - protein, 39 aa, Artificial sequence
  synthetic peptide
ETQNNSTSWPVFKSTEQKYLTLNTESTRIMTKLRAQQCR

SEQ ID NO: 19691 - protein, 39 aa, Artificial sequence
  synthetic peptide
TQNNSTSWPVFKSTEQKYLTLNTESTRIMTKLRAQQCRF

SEQ ID NO: 19692 - protein, 39 aa, Artificial sequence
  synthetic peptide
QNNSTSWPVFKSTEQKYLTLNTESTRIMTKLRAQQCRFW

SEQ ID NO: 19693 - protein, 39 aa, Artificial sequence
  synthetic peptide
NNSTSWPVFKSTEQKYLTLNTESTRIMTKLRAQQCRFWT

SEQ ID NO: 19694 - protein, 39 aa, Artificial sequence
  synthetic peptide
NSTSWPVFKSTEQKYLTLNTESTRIMTKLRAQQCRFWTS

SEQ ID NO: 19695 - protein, 39 aa, Artificial sequence
  synthetic peptide
STSWPVFKSTEQKYLTLNTESTRIMTKLRAQQCRFWTSF

SEQ ID NO: 19696 - protein, 39 aa, Artificial sequence
  synthetic peptide
TSWPVFKSTEQKYLTLNTESTRIMTKLRAQQCRFWTSFF

SEQ ID NO: 19697 - protein, 39 aa, Artificial sequence
  synthetic peptide
SWPVFKSTEQKYLTLNTESTRIMTKLRAQQCRFWTSFFP

SEQ ID NO: 19698 - protein, 39 aa, Artificial sequence
  synthetic peptide
WPVFKSTEQKYLTLNTESTRIMTKLRAQQCRFWTSFFPK

SEQ ID NO: 19699 - protein, 39 aa, Artificial sequence
  synthetic peptide
PVFKSTEQKYLTLNTESTRIMTKLRAQQCRFWTSFFPKV

SEQ ID NO: 19700 - protein, 39 aa, Artificial sequence
  synthetic peptide
VFKSTEQKYLTLNTESTRIMTKLRAQQCRFWTSFFPKVL

SEQ ID NO: 19701 - protein, 39 aa, Artificial sequence
  synthetic peptide
FKSTEQKYLTLNTESTRIMTKLRAQQCRFWTSFFPKVLE

SEQ ID NO: 19702 - protein, 39 aa, Artificial sequence
  synthetic peptide
KSTEQKYLTLNTESTRIMTKLRAQQCRFWTSFFPKVLEM

SEQ ID NO: 19703 - protein, 39 aa, Artificial sequence
  synthetic peptide
STEQKYLTLNTESTRIMTKLRAQQCRFWTSFFPKVLEMT

SEQ ID NO: 19704 - protein, 39 aa, Artificial sequence
  synthetic peptide
TEQKYLTLNTESTRIMTKLRAQQCRFWTSFFPKVLEMTG

SEQ ID NO: 19705 - protein, 39 aa, Artificial sequence
  synthetic peptide
EQKYLTLNTESTRIMTKLRAQQCRFWTSFFPKVLEMTGN

SEQ ID NO: 19706 - protein, 39 aa, Artificial sequence
  synthetic peptide
QKYLTLNTESTRIMTKLRAQQCRFWTSFFPKVLEMTGNI

SEQ ID NO: 19707 - protein, 39 aa, Artificial sequence
  synthetic peptide
KYLTLNTESTRIMTKLRAQQCRFWTSFFPKVLEMTGNID

SEQ ID NO: 19708 - protein, 39 aa, Artificial sequence
  synthetic peptide
YLTLNTESTRIMTKLRAQQCRFWTSFFPKVLEMTGNIDE

SEQ ID NO: 19709 - protein, 39 aa, Artificial sequence
  synthetic peptide
LTLNTESTRIMTKLRAQQCRFWTSFFPKVLEMTGNIDEA

SEQ ID NO: 19710 - protein, 39 aa, Artificial sequence
  synthetic peptide
TLNTESTRIMTKLRAQQCRFWTSFFPKVLEMTGNIDEAE

SEQ ID NO: 19711 - protein, 39 aa, Artificial sequence
  synthetic peptide
LNTESTRIMTKLRAQQCRFWTSFFPKVLEMTGNIDEAEW

SEQ ID NO: 19712 - protein, 39 aa, Artificial sequence
  synthetic peptide
NTESTRIMTKLRAQQCRFWTSFFPKVLEMTGNIDEAEWE

SEQ ID NO: 19713 - protein, 39 aa, Artificial sequence
  synthetic peptide
TESTRIMTKLRAQQCRFWTSFFPKVLEMTGNIDEAEWEW

SEQ ID NO: 19714 - protein, 39 aa, Artificial sequence
  synthetic peptide
ESTRIMTKLRAQQCRFWTSFFPKVLEMTGNIDEAEWEWK

SEQ ID NO: 19715 - protein, 39 aa, Artificial sequence
  synthetic peptide
STRIMTKLRAQQCRFWTSFFPKVLEMTGNIDEAEWEWKA

SEQ ID NO: 19716 - protein, 39 aa, Artificial sequence
  synthetic peptide
TRIMTKLRAQQCRFWTSFFPKVLEMTGNIDEAEWEWKAG

SEQ ID NO: 19717 - protein, 39 aa, Artificial sequence
  synthetic peptide
RIMTKLRAQQCRFWTSFFPKVLEMTGNIDEAEWEWKAGF

SEQ ID NO: 19718 - protein, 39 aa, Artificial sequence
  synthetic peptide
IMTKLRAQQCRFWTSFFPKVLEMTGNIDEAEWEWKAGFH

SEQ ID NO: 19719 - protein, 39 aa, Artificial sequence
  synthetic peptide
MTKLRAQQCRFWTSFFPKVLEMTGNIDEAEWEWKAGFHR

SEQ ID NO: 19720 - protein, 39 aa, Artificial sequence
  synthetic peptide
TKLRAQQCRFWTSFFPKVLEMTGNIDEAEWEWKAGFHRW

SEQ ID NO: 19721 - protein, 39 aa, Artificial sequence
  synthetic peptide
KLRAQQCRFWTSFFPKVLEMTGNIDEAEWEWKAGFHRWN

SEQ ID NO: 19722 - protein, 39 aa, Artificial sequence
  synthetic peptide
LRAQQCRFWTSFFPKVLEMTGNIDEAEWEWKAGFHRWNN

SEQ ID NO: 19723 - protein, 39 aa, Artificial sequence
  synthetic peptide
RAQQCRFWTSFFPKVLEMTGNIDEAEWEWKAGFHRWNNY

SEQ ID NO: 19724 - protein, 39 aa, Artificial sequence
  synthetic peptide
AQQCRFWTSFFPKVLEMTGNIDEAEWEWKAGFHRWNNYM

SEQ ID NO: 19725 - protein, 39 aa, Artificial sequence
  synthetic peptide
QQCRFWTSFFPKVLEMTGNIDEAEWEWKAGFHRWNNYMM

SEQ ID NO: 19726 - protein, 39 aa, Artificial sequence
  synthetic peptide
QCRFWTSFFPKVLEMTGNIDEAEWEWKAGFHRWNNYMMD

SEQ ID NO: 19727 - protein, 39 aa, Artificial sequence
  synthetic peptide
CRFWTSFFPKVLEMTGNIDEAEWEWKAGFHRWNNYMMDW

SEQ ID NO: 19728 - protein, 39 aa, Artificial sequence
  synthetic peptide
RFWTSFFPKVLEMTGNIDEAEWEWKAGFHRWNNYMMDWK

SEQ ID NO: 19729 - protein, 39 aa, Artificial sequence
  synthetic peptide
FWTSFFPKVLEMTGNIDEAEWEWKAGFHRWNNYMMDWKN

SEQ ID NO: 19730 - protein, 39 aa, Artificial sequence
  synthetic peptide
WTSFFPKVLEMTGNIDEAEWEWKAGFHRWNNYMMDWKNQ

SEQ ID NO: 19731 - protein, 39 aa, Artificial sequence
  synthetic peptide
TSFFPKVLEMTGNIDEAEWEWKAGFHRWNNYMMDWKNQF

SEQ ID NO: 19732 - protein, 39 aa, Artificial sequence
  synthetic peptide
SFFPKVLEMTGNIDEAEWEWKAGFHRWNNYMMDWKNQFN

SEQ ID NO: 19733 - protein, 39 aa, Artificial sequence
  synthetic peptide
FFPKVLEMTGNIDEAEWEWKAGFHRWNNYMMDWKNQFND

SEQ ID NO: 19734 - protein, 39 aa, Artificial sequence
  synthetic peptide
FPKVLEMTGNIDEAEWEWKAGFHRWNNYMMDWKNQFNDY

SEQ ID NO: 19735 - protein, 39 aa, Artificial sequence
  synthetic peptide
PKVLEMTGNIDEAEWEWKAGFHRWNNYMMDWKNQFNDYT

SEQ ID NO: 19736 - protein, 39 aa, Artificial sequence
  synthetic peptide
KVLEMTGNIDEAEWEWKAGFHRWNNYMMDWKNQFNDYTS

SEQ ID NO: 19737 - protein, 39 aa, Artificial sequence
  synthetic peptide
VLEMTGNIDEAEWEWKAGFHRWNNYMMDWKNQFNDYTSK

SEQ ID NO: 19738 - protein, 39 aa, Artificial sequence
  synthetic peptide
LEMTGNIDEAEWEWKAGFHRWNNYMMDWKNQFNDYTSKK

SEQ ID NO: 19739 - protein, 39 aa, Artificial sequence
  synthetic peptide
EMTGNIDEAEWEWKAGFHRWNNYMMDWKNQFNDYTSKKE

SEQ ID NO: 19740 - protein, 39 aa, Artificial sequence
  synthetic peptide
MTGNIDEAEWEWKAGFHRWNNYMMDWKNQFNDYTSKKES

SEQ ID NO: 19741 - protein, 39 aa, Artificial sequence
  synthetic peptide
TGNIDEAEWEWKAGFHRWNNYMMDWKNQFNDYTSKKESC

SEQ ID NO: 19742 - protein, 39 aa, Artificial sequence
  synthetic peptide
GNIDEAEWEWKAGFHRWNNYMMDWKNQFNDYTSKKESCV

SEQ ID NO: 19743 - protein, 39 aa, Artificial sequence
  synthetic peptide
NIDEAEWEWKAGFHRWNNYMMDWKNQFNDYTSKKESCVG

SEQ ID NO: 19744 - protein, 39 aa, Artificial sequence
  synthetic peptide
IDEAEWEWKAGFHRWNNYMMDWKNQFNDYTSKKESCVGL

SEQ ID NO: 19745 - protein, 40 aa, Artificial sequence
  synthetic peptide
MHSKVTIICIRFLFWFLLLCMLIGKSHTEDDIIIATKNGK

SEQ ID NO: 19746 - protein, 40 aa, Artificial sequence
  synthetic peptide
HSKVTIICIRFLFWFLLLCMLIGKSHTEDDIIIATKNGKV

SEQ ID NO: 19747 - protein, 40 aa, Artificial sequence
  synthetic peptide
SKVTIICIRFLFWFLLLCMLIGKSHTEDDIIIATKNGKVR

SEQ ID NO: 19748 - protein, 40 aa, Artificial sequence
  synthetic peptide
KVTIICIRFLFWFLLLCMLIGKSHTEDDIIIATKNGKVRG

SEQ ID NO: 19749 - protein, 40 aa, Artificial sequence
  synthetic peptide
VTIICIRFLFWFLLLCMLIGKSHTEDDIIIATKNGKVRGM

SEQ ID NO: 19750 - protein, 40 aa, Artificial sequence
  synthetic peptide
TIICIRFLFWFLLLCMLIGKSHTEDDIIIATKNGKVRGMN

SEQ ID NO: 19751 - protein, 40 aa, Artificial sequence
  synthetic peptide
IICIRFLFWFLLLCMLIGKSHTEDDIIIATKNGKVRGMNL

SEQ ID NO: 19752 - protein, 40 aa, Artificial sequence
  synthetic peptide
ICIRFLFWFLLLCMLIGKSHTEDDIIIATKNGKVRGMNLT

SEQ ID NO: 19753 - protein, 40 aa, Artificial sequence
  synthetic peptide
CIRFLFWFLLLCMLIGKSHTEDDIIIATKNGKVRGMNLTV

SEQ ID NO: 19754 - protein, 40 aa, Artificial sequence
  synthetic peptide
IRFLFWFLLLCMLIGKSHTEDDIIIATKNGKVRGMNLTVF

SEQ ID NO: 19755 - protein, 40 aa, Artificial sequence
  synthetic peptide
RFLFWFLLLCMLIGKSHTEDDIIIATKNGKVRGMNLTVFG

SEQ ID NO: 19756 - protein, 40 aa, Artificial sequence
  synthetic peptide
FLFWFLLLCMLIGKSHTEDDIIIATKNGKVRGMNLTVFGG

SEQ ID NO: 19757 - protein, 40 aa, Artificial sequence
  synthetic peptide
LFWFLLLCMLIGKSHTEDDIIIATKNGKVRGMNLTVFGGT

SEQ ID NO: 19758 - protein, 40 aa, Artificial sequence
  synthetic peptide
FWFLLLCMLIGKSHTEDDIIIATKNGKVRGMNLTVFGGTV

SEQ ID NO: 19759 - protein, 40 aa, Artificial sequence
  synthetic peptide
WFLLLCMLIGKSHTEDDIIIATKNGKVRGMNLTVFGGTVT

SEQ ID NO: 19760 - protein, 40 aa, Artificial sequence
  synthetic peptide
FLLLCMLIGKSHTEDDIIIATKNGKVRGMNLTVFGGTVTA

SEQ ID NO: 19761 - protein, 40 aa, Artificial sequence
  synthetic peptide
LLLCMLIGKSHTEDDIIIATKNGKVRGMNLTVFGGTVTAF

SEQ ID NO: 19762 - protein, 40 aa, Artificial sequence
  synthetic peptide
LLCMLIGKSHTEDDIIIATKNGKVRGMNLTVFGGTVTAFL

SEQ ID NO: 19763 - protein, 40 aa, Artificial sequence
  synthetic peptide
LCMLIGKSHTEDDIIIATKNGKVRGMNLTVFGGTVTAFLG

SEQ ID NO: 19764 - protein, 40 aa, Artificial sequence
  synthetic peptide
CMLIGKSHTEDDIIIATKNGKVRGMNLTVFGGTVTAFLGI

SEQ ID NO: 19765 - protein, 40 aa, Artificial sequence
  synthetic peptide
MLIGKSHTEDDIIIATKNGKVRGMNLTVFGGTVTAFLGIP

SEQ ID NO: 19766 - protein, 40 aa, Artificial sequence
  synthetic peptide
LIGKSHTEDDIIIATKNGKVRGMNLTVFGGTVTAFLGIPY

SEQ ID NO: 19767 - protein, 40 aa, Artificial sequence
  synthetic peptide
IGKSHTEDDIIIATKNGKVRGMNLTVFGGTVTAFLGIPYA

SEQ ID NO: 19768 - protein, 40 aa, Artificial sequence
  synthetic peptide
GKSHTEDDIIIATKNGKVRGMNLTVFGGTVTAFLGIPYAQ

SEQ ID NO: 19769 - protein, 40 aa, Artificial sequence
  synthetic peptide
KSHTEDDIIIATKNGKVRGMNLTVFGGTVTAFLGIPYAQP

SEQ ID NO: 19770 - protein, 40 aa, Artificial sequence
  synthetic peptide
SHTEDDIIIATKNGKVRGMNLTVFGGTVTAFLGIPYAQPP

SEQ ID NO: 19771 - protein, 40 aa, Artificial sequence
  synthetic peptide
HTEDDIIIATKNGKVRGMNLTVFGGTVTAFLGIPYAQPPL

SEQ ID NO: 19772 - protein, 40 aa, Artificial sequence
  synthetic peptide
TEDDIIIATKNGKVRGMNLTVFGGTVTAFLGIPYAQPPLG

SEQ ID NO: 19773 - protein, 40 aa, Artificial sequence
  synthetic peptide
EDDIIIATKNGKVRGMNLTVFGGTVTAFLGIPYAQPPLGR

SEQ ID NO: 19774 - protein, 40 aa, Artificial sequence
  synthetic peptide
DDIIIATKNGKVRGMNLTVFGGTVTAFLGIPYAQPPLGRL

SEQ ID NO: 19775 - protein, 40 aa, Artificial sequence
  synthetic peptide
DIIIATKNGKVRGMNLTVFGGTVTAFLGIPYAQPPLGRLR

SEQ ID NO: 19776 - protein, 40 aa, Artificial sequence
  synthetic peptide
IIIATKNGKVRGMNLTVFGGTVTAFLGIPYAQPPLGRLRF

SEQ ID NO: 19777 - protein, 40 aa, Artificial sequence
  synthetic peptide
IIATKNGKVRGMNLTVFGGTVTAFLGIPYAQPPLGRLRFK

SEQ ID NO: 19778 - protein, 40 aa, Artificial sequence
  synthetic peptide
IATKNGKVRGMNLTVFGGTVTAFLGIPYAQPPLGRLRFKK

SEQ ID NO: 19779 - protein, 40 aa, Artificial sequence
  synthetic peptide
ATKNGKVRGMNLTVFGGTVTAFLGIPYAQPPLGRLRFKKP

SEQ ID NO: 19780 - protein, 40 aa, Artificial sequence
  synthetic peptide
TKNGKVRGMNLTVFGGTVTAFLGIPYAQPPLGRLRFKKPQ

SEQ ID NO: 19781 - protein, 40 aa, Artificial sequence
  synthetic peptide
KNGKVRGMNLTVFGGTVTAFLGIPYAQPPLGRLRFKKPQS

SEQ ID NO: 19782 - protein, 40 aa, Artificial sequence
  synthetic peptide
NGKVRGMNLTVFGGTVTAFLGIPYAQPPLGRLRFKKPQSL

SEQ ID NO: 19783 - protein, 40 aa, Artificial sequence
  synthetic peptide
GKVRGMNLTVFGGTVTAFLGIPYAQPPLGRLRFKKPQSLT

SEQ ID NO: 19784 - protein, 40 aa, Artificial sequence
  synthetic peptide
KVRGMNLTVFGGTVTAFLGIPYAQPPLGRLRFKKPQSLTK

SEQ ID NO: 19785 - protein, 40 aa, Artificial sequence
  synthetic peptide
VRGMNLTVFGGTVTAFLGIPYAQPPLGRLRFKKPQSLTKW

SEQ ID NO: 19786 - protein, 40 aa, Artificial sequence
  synthetic peptide
RGMNLTVFGGTVTAFLGIPYAQPPLGRLRFKKPQSLTKWS

SEQ ID NO: 19787 - protein, 40 aa, Artificial sequence
  synthetic peptide
GMNLTVFGGTVTAFLGIPYAQPPLGRLRFKKPQSLTKWSD

SEQ ID NO: 19788 - protein, 40 aa, Artificial sequence
  synthetic peptide
MNLTVFGGTVTAFLGIPYAQPPLGRLRFKKPQSLTKWSDI

SEQ ID NO: 19789 - protein, 40 aa, Artificial sequence
  synthetic peptide
NLTVFGGTVTAFLGIPYAQPPLGRLRFKKPQSLTKWSDIW

SEQ ID NO: 19790 - protein, 40 aa, Artificial sequence
  synthetic peptide
LTVFGGTVTAFLGIPYAQPPLGRLRFKKPQSLTKWSDIWN

SEQ ID NO: 19791 - protein, 40 aa, Artificial sequence
  synthetic peptide
TVFGGTVTAFLGIPYAQPPLGRLRFKKPQSLTKWSDIWNA

SEQ ID NO: 19792 - protein, 40 aa, Artificial sequence
  synthetic peptide
VFGGTVTAFLGIPYAQPPLGRLRFKKPQSLTKWSDIWNAT

SEQ ID NO: 19793 - protein, 40 aa, Artificial sequence
  synthetic peptide
FGGTVTAFLGIPYAQPPLGRLRFKKPQSLTKWSDIWNATK

SEQ ID NO: 19794 - protein, 40 aa, Artificial sequence
  synthetic peptide
GGTVTAFLGIPYAQPPLGRLRFKKPQSLTKWSDIWNATKY

SEQ ID NO: 19795 - protein, 40 aa, Artificial sequence
  synthetic peptide
GTVTAFLGIPYAQPPLGRLRFKKPQSLTKWSDIWNATKYA

SEQ ID NO: 19796 - protein, 40 aa, Artificial sequence
  synthetic peptide
TVTAFLGIPYAQPPLGRLRFKKPQSLTKWSDIWNATKYAN

SEQ ID NO: 19797 - protein, 40 aa, Artificial sequence
  synthetic peptide
VTAFLGIPYAQPPLGRLRFKKPQSLTKWSDIWNATKYANS

SEQ ID NO: 19798 - protein, 40 aa, Artificial sequence
  synthetic peptide
TAFLGIPYAQPPLGRLRFKKPQSLTKWSDIWNATKYANSC

SEQ ID NO: 19799 - protein, 40 aa, Artificial sequence
  synthetic peptide
AFLGIPYAQPPLGRLRFKKPQSLTKWSDIWNATKYANSCC

SEQ ID NO: 19800 - protein, 40 aa, Artificial sequence
  synthetic peptide
FLGIPYAQPPLGRLRFKKPQSLTKWSDIWNATKYANSCCQ

SEQ ID NO: 19801 - protein, 40 aa, Artificial sequence
  synthetic peptide
LGIPYAQPPLGRLRFKKPQSLTKWSDIWNATKYANSCCQN

SEQ ID NO: 19802 - protein, 40 aa, Artificial sequence
  synthetic peptide
GIPYAQPPLGRLRFKKPQSLTKWSDIWNATKYANSCCQNI

SEQ ID NO: 19803 - protein, 40 aa, Artificial sequence
  synthetic peptide
IPYAQPPLGRLRFKKPQSLTKWSDIWNATKYANSCCQNID

SEQ ID NO: 19804 - protein, 40 aa, Artificial sequence
  synthetic peptide
PYAQPPLGRLRFKKPQSLTKWSDIWNATKYANSCCQNIDQ

SEQ ID NO: 19805 - protein, 40 aa, Artificial sequence
  synthetic peptide
YAQPPLGRLRFKKPQSLTKWSDIWNATKYANSCCQNIDQS

SEQ ID NO: 19806 - protein, 40 aa, Artificial sequence
  synthetic peptide
AQPPLGRLRFKKPQSLTKWSDIWNATKYANSCCQNIDQSF

SEQ ID NO: 19807 - protein, 40 aa, Artificial sequence
  synthetic peptide
QPPLGRLRFKKPQSLTKWSDIWNATKYANSCCQNIDQSFP

SEQ ID NO: 19808 - protein, 40 aa, Artificial sequence
  synthetic peptide
PPLGRLRFKKPQSLTKWSDIWNATKYANSCCQNIDQSFPG

SEQ ID NO: 19809 - protein, 40 aa, Artificial sequence
  synthetic peptide
PLGRLRFKKPQSLTKWSDIWNATKYANSCCQNIDQSFPGF

SEQ ID NO: 19810 - protein, 40 aa, Artificial sequence
  synthetic peptide
LGRLRFKKPQSLTKWSDIWNATKYANSCCQNIDQSFPGFH

SEQ ID NO: 19811 - protein, 40 aa, Artificial sequence
  synthetic peptide
GRLRFKKPQSLTKWSDIWNATKYANSCCQNIDQSFPGFHG

SEQ ID NO: 19812 - protein, 40 aa, Artificial sequence
  synthetic peptide
RLRFKKPQSLTKWSDIWNATKYANSCCQNIDQSFPGFHGS

SEQ ID NO: 19813 - protein, 40 aa, Artificial sequence
  synthetic peptide
LRFKKPQSLTKWSDIWNATKYANSCCQNIDQSFPGFHGSE

SEQ ID NO: 19814 - protein, 40 aa, Artificial sequence
  synthetic peptide
RFKKPQSLTKWSDIWNATKYANSCCQNIDQSFPGFHGSEM

SEQ ID NO: 19815 - protein, 40 aa, Artificial sequence
  synthetic peptide
FKKPQSLTKWSDIWNATKYANSCCQNIDQSFPGFHGSEMW

SEQ ID NO: 19816 - protein, 40 aa, Artificial sequence
  synthetic peptide
KKPQSLTKWSDIWNATKYANSCCQNIDQSFPGFHGSEMWN

SEQ ID NO: 19817 - protein, 40 aa, Artificial sequence
  synthetic peptide
KPQSLTKWSDIWNATKYANSCCQNIDQSFPGFHGSEMWNP

SEQ ID NO: 19818 - protein, 40 aa, Artificial sequence
  synthetic peptide
PQSLTKWSDIWNATKYANSCCQNIDQSFPGFHGSEMWNPN

SEQ ID NO: 19819 - protein, 40 aa, Artificial sequence
  synthetic peptide
QSLTKWSDIWNATKYANSCCQNIDQSFPGFHGSEMWNPNT

SEQ ID NO: 19820 - protein, 40 aa, Artificial sequence
  synthetic peptide
SLTKWSDIWNATKYANSCCQNIDQSFPGFHGSEMWNPNTD

SEQ ID NO: 19821 - protein, 40 aa, Artificial sequence
  synthetic peptide
LTKWSDIWNATKYANSCCQNIDQSFPGFHGSEMWNPNTDL

SEQ ID NO: 19822 - protein, 40 aa, Artificial sequence
  synthetic peptide
TKWSDIWNATKYANSCCQNIDQSFPGFHGSEMWNPNTDLS

SEQ ID NO: 19823 - protein, 40 aa, Artificial sequence
  synthetic peptide
KWSDIWNATKYANSCCQNIDQSFPGFHGSEMWNPNTDLSE

SEQ ID NO: 19824 - protein, 40 aa, Artificial sequence
  synthetic peptide
WSDIWNATKYANSCCQNIDQSFPGFHGSEMWNPNTDLSED

SEQ ID NO: 19825 - protein, 40 aa, Artificial sequence
  synthetic peptide
SDIWNATKYANSCCQNIDQSFPGFHGSEMWNPNTDLSEDC

SEQ ID NO: 19826 - protein, 40 aa, Artificial sequence
  synthetic peptide
DIWNATKYANSCCQNIDQSFPGFHGSEMWNPNTDLSEDCL

SEQ ID NO: 19827 - protein, 40 aa, Artificial sequence
  synthetic peptide
IWNATKYANSCCQNIDQSFPGFHGSEMWNPNTDLSEDCLY

SEQ ID NO: 19828 - protein, 40 aa, Artificial sequence
  synthetic peptide
WNATKYANSCCQNIDQSFPGFHGSEMWNPNTDLSEDCLYL

SEQ ID NO: 19829 - protein, 40 aa, Artificial sequence
  synthetic peptide
NATKYANSCCQNIDQSFPGFHGSEMWNPNTDLSEDCLYLN

SEQ ID NO: 19830 - protein, 40 aa, Artificial sequence
  synthetic peptide
ATKYANSCCQNIDQSFPGFHGSEMWNPNTDLSEDCLYLNV

SEQ ID NO: 19831 - protein, 40 aa, Artificial sequence
  synthetic peptide
TKYANSCCQNIDQSFPGFHGSEMWNPNTDLSEDCLYLNVW

SEQ ID NO: 19832 - protein, 40 aa, Artificial sequence
  synthetic peptide
KYANSCCQNIDQSFPGFHGSEMWNPNTDLSEDCLYLNVWI

SEQ ID NO: 19833 - protein, 40 aa, Artificial sequence
  synthetic peptide
YANSCCQNIDQSFPGFHGSEMWNPNTDLSEDCLYLNVWIP

SEQ ID NO: 19834 - protein, 40 aa, Artificial sequence
  synthetic peptide
ANSCCQNIDQSFPGFHGSEMWNPNTDLSEDCLYLNVWIPA

SEQ ID NO: 19835 - protein, 40 aa, Artificial sequence
  synthetic peptide
NSCCQNIDQSFPGFHGSEMWNPNTDLSEDCLYLNVWIPAP

SEQ ID NO: 19836 - protein, 40 aa, Artificial sequence
  synthetic peptide
SCCQNIDQSFPGFHGSEMWNPNTDLSEDCLYLNVWIPAPK

SEQ ID NO: 19837 - protein, 40 aa, Artificial sequence
  synthetic peptide
CCQNIDQSFPGFHGSEMWNPNTDLSEDCLYLNVWIPAPKP

SEQ ID NO: 19838 - protein, 40 aa, Artificial sequence
  synthetic peptide
CQNIDQSFPGFHGSEMWNPNTDLSEDCLYLNVWIPAPKPK

SEQ ID NO: 19839 - protein, 40 aa, Artificial sequence
  synthetic peptide
QNIDQSFPGFHGSEMWNPNTDLSEDCLYLNVWIPAPKPKN

SEQ ID NO: 19840 - protein, 40 aa, Artificial sequence
  synthetic peptide
NIDQSFPGFHGSEMWNPNTDLSEDCLYLNVWIPAPKPKNA

SEQ ID NO: 19841 - protein, 40 aa, Artificial sequence
  synthetic peptide
IDQSFPGFHGSEMWNPNTDLSEDCLYLNVWIPAPKPKNAT

SEQ ID NO: 19842 - protein, 40 aa, Artificial sequence
  synthetic peptide
DQSFPGFHGSEMWNPNTDLSEDCLYLNVWIPAPKPKNATV

SEQ ID NO: 19843 - protein, 40 aa, Artificial sequence
  synthetic peptide
QSFPGFHGSEMWNPNTDLSEDCLYLNVWIPAPKPKNATVL

SEQ ID NO: 19844 - protein, 40 aa, Artificial sequence
  synthetic peptide
SFPGFHGSEMWNPNTDLSEDCLYLNVWIPAPKPKNATVLI

SEQ ID NO: 19845 - protein, 40 aa, Artificial sequence
  synthetic peptide
FPGFHGSEMWNPNTDLSEDCLYLNVWIPAPKPKNATVLIW

SEQ ID NO: 19846 - protein, 40 aa, Artificial sequence
  synthetic peptide
PGFHGSEMWNPNTDLSEDCLYLNVWIPAPKPKNATVLIWI

SEQ ID NO: 19847 - protein, 40 aa, Artificial sequence
  synthetic peptide
GFHGSEMWNPNTDLSEDCLYLNVWIPAPKPKNATVLIWIY

SEQ ID NO: 19848 - protein, 40 aa, Artificial sequence
  synthetic peptide
FHGSEMWNPNTDLSEDCLYLNVWIPAPKPKNATVLIWIYG

SEQ ID NO: 19849 - protein, 40 aa, Artificial sequence
  synthetic peptide
HGSEMWNPNTDLSEDCLYLNVWIPAPKPKNATVLIWIYGG

SEQ ID NO: 19850 - protein, 40 aa, Artificial sequence
  synthetic peptide
GSEMWNPNTDLSEDCLYLNVWIPAPKPKNATVLIWIYGGG

SEQ ID NO: 19851 - protein, 40 aa, Artificial sequence
  synthetic peptide
SEMWNPNTDLSEDCLYLNVWIPAPKPKNATVLIWIYGGGF

SEQ ID NO: 19852 - protein, 40 aa, Artificial sequence
  synthetic peptide
EMWNPNTDLSEDCLYLNVWIPAPKPKNATVLIWIYGGGFQ

SEQ ID NO: 19853 - protein, 40 aa, Artificial sequence
  synthetic peptide
MWNPNTDLSEDCLYLNVWIPAPKPKNATVLIWIYGGGFQT

SEQ ID NO: 19854 - protein, 40 aa, Artificial sequence
  synthetic peptide
WNPNTDLSEDCLYLNVWIPAPKPKNATVLIWIYGGGFQTG

SEQ ID NO: 19855 - protein, 40 aa, Artificial sequence
  synthetic peptide
NPNTDLSEDCLYLNVWIPAPKPKNATVLIWIYGGGFQTGT

SEQ ID NO: 19856 - protein, 40 aa, Artificial sequence
  synthetic peptide
PNTDLSEDCLYLNVWIPAPKPKNATVLIWIYGGGFQTGTS

SEQ ID NO: 19857 - protein, 40 aa, Artificial sequence
  synthetic peptide
NTDLSEDCLYLNVWIPAPKPKNATVLIWIYGGGFQTGTSS

SEQ ID NO: 19858 - protein, 40 aa, Artificial sequence
  synthetic peptide
TDLSEDCLYLNVWIPAPKPKNATVLIWIYGGGFQTGTSSL

SEQ ID NO: 19859 - protein, 40 aa, Artificial sequence
  synthetic peptide
DLSEDCLYLNVWIPAPKPKNATVLIWIYGGGFQTGTSSLH

SEQ ID NO: 19860 - protein, 40 aa, Artificial sequence
  synthetic peptide
LSEDCLYLNVWIPAPKPKNATVLIWIYGGGFQTGTSSLHV

SEQ ID NO: 19861 - protein, 40 aa, Artificial sequence
  synthetic peptide
SEDCLYLNVWIPAPKPKNATVLIWIYGGGFQTGTSSLHVY

SEQ ID NO: 19862 - protein, 40 aa, Artificial sequence
  synthetic peptide
EDCLYLNVWIPAPKPKNATVLIWIYGGGFQTGTSSLHVYD

SEQ ID NO: 19863 - protein, 40 aa, Artificial sequence
  synthetic peptide
DCLYLNVWIPAPKPKNATVLIWIYGGGFQTGTSSLHVYDG

SEQ ID NO: 19864 - protein, 40 aa, Artificial sequence
  synthetic peptide
CLYLNVWIPAPKPKNATVLIWIYGGGFQTGTSSLHVYDGK

SEQ ID NO: 19865 - protein, 40 aa, Artificial sequence
  synthetic peptide
LYLNVWIPAPKPKNATVLIWIYGGGFQTGTSSLHVYDGKF

SEQ ID NO: 19866 - protein, 40 aa, Artificial sequence
  synthetic peptide
YLNVWIPAPKPKNATVLIWIYGGGFQTGTSSLHVYDGKFL

SEQ ID NO: 19867 - protein, 40 aa, Artificial sequence
  synthetic peptide
LNVWIPAPKPKNATVLIWIYGGGFQTGTSSLHVYDGKFLA

SEQ ID NO: 19868 - protein, 40 aa, Artificial sequence
  synthetic peptide
NVWIPAPKPKNATVLIWIYGGGFQTGTSSLHVYDGKFLAR

SEQ ID NO: 19869 - protein, 40 aa, Artificial sequence
  synthetic peptide
VWIPAPKPKNATVLIWIYGGGFQTGTSSLHVYDGKFLARV

SEQ ID NO: 19870 - protein, 40 aa, Artificial sequence
  synthetic peptide
WIPAPKPKNATVLIWIYGGGFQTGTSSLHVYDGKFLARVE

SEQ ID NO: 19871 - protein, 40 aa, Artificial sequence
  synthetic peptide
IPAPKPKNATVLIWIYGGGFQTGTSSLHVYDGKFLARVER

SEQ ID NO: 19872 - protein, 40 aa, Artificial sequence
  synthetic peptide
PAPKPKNATVLIWIYGGGFQTGTSSLHVYDGKFLARVERV

SEQ ID NO: 19873 - protein, 40 aa, Artificial sequence
  synthetic peptide
APKPKNATVLIWIYGGGFQTGTSSLHVYDGKFLARVERVI

SEQ ID NO: 19874 - protein, 40 aa, Artificial sequence
  synthetic peptide
PKPKNATVLIWIYGGGFQTGTSSLHVYDGKFLARVERVIV

SEQ ID NO: 19875 - protein, 40 aa, Artificial sequence
  synthetic peptide
KPKNATVLIWIYGGGFQTGTSSLHVYDGKFLARVERVIVV

SEQ ID NO: 19876 - protein, 40 aa, Artificial sequence
  synthetic peptide
PKNATVLIWIYGGGFQTGTSSLHVYDGKFLARVERVIVVS

SEQ ID NO: 19877 - protein, 40 aa, Artificial sequence
  synthetic peptide
KNATVLIWIYGGGFQTGTSSLHVYDGKFLARVERVIVVSM

SEQ ID NO: 19878 - protein, 40 aa, Artificial sequence
  synthetic peptide
NATVLIWIYGGGFQTGTSSLHVYDGKFLARVERVIVVSMN

SEQ ID NO: 19879 - protein, 40 aa, Artificial sequence
  synthetic peptide
ATVLIWIYGGGFQTGTSSLHVYDGKFLARVERVIVVSMNY

SEQ ID NO: 19880 - protein, 40 aa, Artificial sequence
  synthetic peptide
TVLIWIYGGGFQTGTSSLHVYDGKFLARVERVIVVSMNYR

SEQ ID NO: 19881 - protein, 40 aa, Artificial sequence
  synthetic peptide
VLIWIYGGGFQTGTSSLHVYDGKFLARVERVIVVSMNYRV

SEQ ID NO: 19882 - protein, 40 aa, Artificial sequence
  synthetic peptide
LIWIYGGGFQTGTSSLHVYDGKFLARVERVIVVSMNYRVG

SEQ ID NO: 19883 - protein, 40 aa, Artificial sequence
  synthetic peptide
IWIYGGGFQTGTSSLHVYDGKFLARVERVIVVSMNYRVGA

SEQ ID NO: 19884 - protein, 40 aa, Artificial sequence
  synthetic peptide
WIYGGGFQTGTSSLHVYDGKFLARVERVIVVSMNYRVGAL

SEQ ID NO: 19885 - protein, 40 aa, Artificial sequence
  synthetic peptide
IYGGGFQTGTSSLHVYDGKFLARVERVIVVSMNYRVGALG

SEQ ID NO: 19886 - protein, 40 aa, Artificial sequence
  synthetic peptide
YGGGFQTGTSSLHVYDGKFLARVERVIVVSMNYRVGALGF

SEQ ID NO: 19887 - protein, 40 aa, Artificial sequence
  synthetic peptide
GGGFQTGTSSLHVYDGKFLARVERVIVVSMNYRVGALGFL

SEQ ID NO: 19888 - protein, 40 aa, Artificial sequence
  synthetic peptide
GGFQTGTSSLHVYDGKFLARVERVIVVSMNYRVGALGFLA

SEQ ID NO: 19889 - protein, 40 aa, Artificial sequence
  synthetic peptide
GFQTGTSSLHVYDGKFLARVERVIVVSMNYRVGALGFLAL

SEQ ID NO: 19890 - protein, 40 aa, Artificial sequence
  synthetic peptide
FQTGTSSLHVYDGKFLARVERVIVVSMNYRVGALGFLALP

SEQ ID NO: 19891 - protein, 40 aa, Artificial sequence
  synthetic peptide
QTGTSSLHVYDGKFLARVERVIVVSMNYRVGALGFLALPG

SEQ ID NO: 19892 - protein, 40 aa, Artificial sequence
  synthetic peptide
TGTSSLHVYDGKFLARVERVIVVSMNYRVGALGFLALPGN

SEQ ID NO: 19893 - protein, 40 aa, Artificial sequence
  synthetic peptide
GTSSLHVYDGKFLARVERVIVVSMNYRVGALGFLALPGNP

SEQ ID NO: 19894 - protein, 40 aa, Artificial sequence
  synthetic peptide
TSSLHVYDGKFLARVERVIVVSMNYRVGALGFLALPGNPE

SEQ ID NO: 19895 - protein, 40 aa, Artificial sequence
  synthetic peptide
SSLHVYDGKFLARVERVIVVSMNYRVGALGFLALPGNPEA

SEQ ID NO: 19896 - protein, 40 aa, Artificial sequence
  synthetic peptide
SLHVYDGKFLARVERVIVVSMNYRVGALGFLALPGNPEAP

SEQ ID NO: 19897 - protein, 40 aa, Artificial sequence
  synthetic peptide
LHVYDGKFLARVERVIVVSMNYRVGALGFLALPGNPEAPG

SEQ ID NO: 19898 - protein, 40 aa, Artificial sequence
  synthetic peptide
HVYDGKFLARVERVIVVSMNYRVGALGFLALPGNPEAPGN

SEQ ID NO: 19899 - protein, 40 aa, Artificial sequence
  synthetic peptide
VYDGKFLARVERVIVVSMNYRVGALGFLALPGNPEAPGNM

SEQ ID NO: 19900 - protein, 40 aa, Artificial sequence
  synthetic peptide
YDGKFLARVERVIVVSMNYRVGALGFLALPGNPEAPGNMG

SEQ ID NO: 19901 - protein, 40 aa, Artificial sequence
  synthetic peptide
DGKFLARVERVIVVSMNYRVGALGFLALPGNPEAPGNMGL

SEQ ID NO: 19902 - protein, 40 aa, Artificial sequence
  synthetic peptide
GKFLARVERVIVVSMNYRVGALGFLALPGNPEAPGNMGLF

SEQ ID NO: 19903 - protein, 40 aa, Artificial sequence
  synthetic peptide
KFLARVERVIVVSMNYRVGALGFLALPGNPEAPGNMGLFD

SEQ ID NO: 19904 - protein, 40 aa, Artificial sequence
  synthetic peptide
FLARVERVIVVSMNYRVGALGFLALPGNPEAPGNMGLFDQ

SEQ ID NO: 19905 - protein, 40 aa, Artificial sequence
  synthetic peptide
LARVERVIVVSMNYRVGALGFLALPGNPEAPGNMGLFDQQ

SEQ ID NO: 19906 - protein, 40 aa, Artificial sequence
  synthetic peptide
ARVERVIVVSMNYRVGALGFLALPGNPEAPGNMGLFDQQL

SEQ ID NO: 19907 - protein, 40 aa, Artificial sequence
  synthetic peptide
RVERVIVVSMNYRVGALGFLALPGNPEAPGNMGLFDQQLA

SEQ ID NO: 19908 - protein, 40 aa, Artificial sequence
  synthetic peptide
VERVIVVSMNYRVGALGFLALPGNPEAPGNMGLFDQQLAL

SEQ ID NO: 19909 - protein, 40 aa, Artificial sequence
  synthetic peptide
ERVIVVSMNYRVGALGFLALPGNPEAPGNMGLFDQQLALQ

SEQ ID NO: 19910 - protein, 40 aa, Artificial sequence
  synthetic peptide
RVIVVSMNYRVGALGFLALPGNPEAPGNMGLFDQQLALQW

SEQ ID NO: 19911 - protein, 40 aa, Artificial sequence
  synthetic peptide
VIVVSMNYRVGALGFLALPGNPEAPGNMGLFDQQLALQWV

SEQ ID NO: 19912 - protein, 40 aa, Artificial sequence
  synthetic peptide
IVVSMNYRVGALGFLALPGNPEAPGNMGLFDQQLALQWVQ

SEQ ID NO: 19913 - protein, 40 aa, Artificial sequence
  synthetic peptide
VVSMNYRVGALGFLALPGNPEAPGNMGLFDQQLALQWVQK

SEQ ID NO: 19914 - protein, 40 aa, Artificial sequence
  synthetic peptide
VSMNYRVGALGFLALPGNPEAPGNMGLFDQQLALQWVQKN

SEQ ID NO: 19915 - protein, 40 aa, Artificial sequence
  synthetic peptide
SMNYRVGALGFLALPGNPEAPGNMGLFDQQLALQWVQKNI

SEQ ID NO: 19916 - protein, 40 aa, Artificial sequence
  synthetic peptide
MNYRVGALGFLALPGNPEAPGNMGLFDQQLALQWVQKNIA

SEQ ID NO: 19917 - protein, 40 aa, Artificial sequence
  synthetic peptide
NYRVGALGFLALPGNPEAPGNMGLFDQQLALQWVQKNIAA

SEQ ID NO: 19918 - protein, 40 aa, Artificial sequence
  synthetic peptide
YRVGALGFLALPGNPEAPGNMGLFDQQLALQWVQKNIAAF

SEQ ID NO: 19919 - protein, 40 aa, Artificial sequence
  synthetic peptide
RVGALGFLALPGNPEAPGNMGLFDQQLALQWVQKNIAAFG

SEQ ID NO: 19920 - protein, 40 aa, Artificial sequence
  synthetic peptide
VGALGFLALPGNPEAPGNMGLFDQQLALQWVQKNIAAFGG

SEQ ID NO: 19921 - protein, 40 aa, Artificial sequence
  synthetic peptide
GALGFLALPGNPEAPGNMGLFDQQLALQWVQKNIAAFGGN

SEQ ID NO: 19922 - protein, 40 aa, Artificial sequence
  synthetic peptide
ALGFLALPGNPEAPGNMGLFDQQLALQWVQKNIAAFGGNP

SEQ ID NO: 19923 - protein, 40 aa, Artificial sequence
  synthetic peptide
LGFLALPGNPEAPGNMGLFDQQLALQWVQKNIAAFGGNPK

SEQ ID NO: 19924 - protein, 40 aa, Artificial sequence
  synthetic peptide
GFLALPGNPEAPGNMGLFDQQLALQWVQKNIAAFGGNPKS

SEQ ID NO: 19925 - protein, 40 aa, Artificial sequence
  synthetic peptide
FLALPGNPEAPGNMGLFDQQLALQWVQKNIAAFGGNPKSV

SEQ ID NO: 19926 - protein, 40 aa, Artificial sequence
  synthetic peptide
LALPGNPEAPGNMGLFDQQLALQWVQKNIAAFGGNPKSVT

SEQ ID NO: 19927 - protein, 40 aa, Artificial sequence
  synthetic peptide
ALPGNPEAPGNMGLFDQQLALQWVQKNIAAFGGNPKSVTL

SEQ ID NO: 19928 - protein, 40 aa, Artificial sequence
  synthetic peptide
LPGNPEAPGNMGLFDQQLALQWVQKNIAAFGGNPKSVTLF

SEQ ID NO: 19929 - protein, 40 aa, Artificial sequence
  synthetic peptide
PGNPEAPGNMGLFDQQLALQWVQKNIAAFGGNPKSVTLFG

SEQ ID NO: 19930 - protein, 40 aa, Artificial sequence
  synthetic peptide
GNPEAPGNMGLFDQQLALQWVQKNIAAFGGNPKSVTLFGE

SEQ ID NO: 19931 - protein, 40 aa, Artificial sequence
  synthetic peptide
NPEAPGNMGLFDQQLALQWVQKNIAAFGGNPKSVTLFGES

SEQ ID NO: 19932 - protein, 40 aa, Artificial sequence
  synthetic peptide
PEAPGNMGLFDQQLALQWVQKNIAAFGGNPKSVTLFGESA

SEQ ID NO: 19933 - protein, 40 aa, Artificial sequence
  synthetic peptide
EAPGNMGLFDQQLALQWVQKNIAAFGGNPKSVTLFGESAG

SEQ ID NO: 19934 - protein, 40 aa, Artificial sequence
  synthetic peptide
APGNMGLFDQQLALQWVQKNIAAFGGNPKSVTLFGESAGA

SEQ ID NO: 19935 - protein, 40 aa, Artificial sequence
  synthetic peptide
PGNMGLFDQQLALQWVQKNIAAFGGNPKSVTLFGESAGAA

SEQ ID NO: 19936 - protein, 40 aa, Artificial sequence
  synthetic peptide
GNMGLFDQQLALQWVQKNIAAFGGNPKSVTLFGESAGAAS

SEQ ID NO: 19937 - protein, 40 aa, Artificial sequence
  synthetic peptide
NMGLFDQQLALQWVQKNIAAFGGNPKSVTLFGESAGAASV

SEQ ID NO: 19938 - protein, 40 aa, Artificial sequence
  synthetic peptide
MGLFDQQLALQWVQKNIAAFGGNPKSVTLFGESAGAASVS

SEQ ID NO: 19939 - protein, 40 aa, Artificial sequence
  synthetic peptide
GLFDQQLALQWVQKNIAAFGGNPKSVTLFGESAGAASVSL

SEQ ID NO: 19940 - protein, 40 aa, Artificial sequence
  synthetic peptide
LFDQQLALQWVQKNIAAFGGNPKSVTLFGESAGAASVSLH

SEQ ID NO: 19941 - protein, 40 aa, Artificial sequence
  synthetic peptide
FDQQLALQWVQKNIAAFGGNPKSVTLFGESAGAASVSLHL

SEQ ID NO: 19942 - protein, 40 aa, Artificial sequence
  synthetic peptide
DQQLALQWVQKNIAAFGGNPKSVTLFGESAGAASVSLHLL

SEQ ID NO: 19943 - protein, 40 aa, Artificial sequence
  synthetic peptide
QQLALQWVQKNIAAFGGNPKSVTLFGESAGAASVSLHLLS

SEQ ID NO: 19944 - protein, 40 aa, Artificial sequence
  synthetic peptide
QLALQWVQKNIAAFGGNPKSVTLFGESAGAASVSLHLLSP

SEQ ID NO: 19945 - protein, 40 aa, Artificial sequence
  synthetic peptide
LALQWVQKNIAAFGGNPKSVTLFGESAGAASVSLHLLSPG

SEQ ID NO: 19946 - protein, 40 aa, Artificial sequence
  synthetic peptide
ALQWVQKNIAAFGGNPKSVTLFGESAGAASVSLHLLSPGS

SEQ ID NO: 19947 - protein, 40 aa, Artificial sequence
  synthetic peptide
LQWVQKNIAAFGGNPKSVTLFGESAGAASVSLHLLSPGSH

SEQ ID NO: 19948 - protein, 40 aa, Artificial sequence
  synthetic peptide
QWVQKNIAAFGGNPKSVTLFGESAGAASVSLHLLSPGSHS

SEQ ID NO: 19949 - protein, 40 aa, Artificial sequence
  synthetic peptide
WVQKNIAAFGGNPKSVTLFGESAGAASVSLHLLSPGSHSL

SEQ ID NO: 19950 - protein, 40 aa, Artificial sequence
  synthetic peptide
VQKNIAAFGGNPKSVTLFGESAGAASVSLHLLSPGSHSLF

SEQ ID NO: 19951 - protein, 40 aa, Artificial sequence
  synthetic peptide
QKNIAAFGGNPKSVTLFGESAGAASVSLHLLSPGSHSLFT

SEQ ID NO: 19952 - protein, 40 aa, Artificial sequence
  synthetic peptide
KNIAAFGGNPKSVTLFGESAGAASVSLHLLSPGSHSLFTR

SEQ ID NO: 19953 - protein, 40 aa, Artificial sequence
  synthetic peptide
NIAAFGGNPKSVTLFGESAGAASVSLHLLSPGSHSLFTRA

SEQ ID NO: 19954 - protein, 40 aa, Artificial sequence
  synthetic peptide
IAAFGGNPKSVTLFGESAGAASVSLHLLSPGSHSLFTRAI

SEQ ID NO: 19955 - protein, 40 aa, Artificial sequence
  synthetic peptide
AAFGGNPKSVTLFGESAGAASVSLHLLSPGSHSLFTRAIL

SEQ ID NO: 19956 - protein, 40 aa, Artificial sequence
  synthetic peptide
AFGGNPKSVTLFGESAGAASVSLHLLSPGSHSLFTRAILQ

SEQ ID NO: 19957 - protein, 40 aa, Artificial sequence
  synthetic peptide
FGGNPKSVTLFGESAGAASVSLHLLSPGSHSLFTRAILQS

SEQ ID NO: 19958 - protein, 40 aa, Artificial sequence
  synthetic peptide
GGNPKSVTLFGESAGAASVSLHLLSPGSHSLFTRAILQSG

SEQ ID NO: 19959 - protein, 40 aa, Artificial sequence
  synthetic peptide
GNPKSVTLFGESAGAASVSLHLLSPGSHSLFTRAILQSGS

SEQ ID NO: 19960 - protein, 40 aa, Artificial sequence
  synthetic peptide
NPKSVTLFGESAGAASVSLHLLSPGSHSLFTRAILQSGSF

SEQ ID NO: 19961 - protein, 40 aa, Artificial sequence
  synthetic peptide
PKSVTLFGESAGAASVSLHLLSPGSHSLFTRAILQSGSFN

SEQ ID NO: 19962 - protein, 40 aa, Artificial sequence
  synthetic peptide
KSVTLFGESAGAASVSLHLLSPGSHSLFTRAILQSGSFNA

SEQ ID NO: 19963 - protein, 40 aa, Artificial sequence
  synthetic peptide
SVTLFGESAGAASVSLHLLSPGSHSLFTRAILQSGSFNAP

SEQ ID NO: 19964 - protein, 40 aa, Artificial sequence
  synthetic peptide
VTLFGESAGAASVSLHLLSPGSHSLFTRAILQSGSFNAPW

SEQ ID NO: 19965 - protein, 40 aa, Artificial sequence
  synthetic peptide
TLFGESAGAASVSLHLLSPGSHSLFTRAILQSGSFNAPWA

SEQ ID NO: 19966 - protein, 40 aa, Artificial sequence
  synthetic peptide
LFGESAGAASVSLHLLSPGSHSLFTRAILQSGSFNAPWAV

SEQ ID NO: 19967 - protein, 40 aa, Artificial sequence
  synthetic peptide
FGESAGAASVSLHLLSPGSHSLFTRAILQSGSFNAPWAVT

SEQ ID NO: 19968 - protein, 40 aa, Artificial sequence
  synthetic peptide
GESAGAASVSLHLLSPGSHSLFTRAILQSGSFNAPWAVTS

SEQ ID NO: 19969 - protein, 40 aa, Artificial sequence
  synthetic peptide
ESAGAASVSLHLLSPGSHSLFTRAILQSGSFNAPWAVTSL

SEQ ID NO: 19970 - protein, 40 aa, Artificial sequence
  synthetic peptide
SAGAASVSLHLLSPGSHSLFTRAILQSGSFNAPWAVTSLY

SEQ ID NO: 19971 - protein, 40 aa, Artificial sequence
  synthetic peptide
AGAASVSLHLLSPGSHSLFTRAILQSGSFNAPWAVTSLYE

SEQ ID NO: 19972 - protein, 40 aa, Artificial sequence
  synthetic peptide
GAASVSLHLLSPGSHSLFTRAILQSGSFNAPWAVTSLYEA

SEQ ID NO: 19973 - protein, 40 aa, Artificial sequence
  synthetic peptide
AASVSLHLLSPGSHSLFTRAILQSGSFNAPWAVTSLYEAR

SEQ ID NO: 19974 - protein, 40 aa, Artificial sequence
  synthetic peptide
ASVSLHLLSPGSHSLFTRAILQSGSFNAPWAVTSLYEARN

SEQ ID NO: 19975 - protein, 40 aa, Artificial sequence
  synthetic peptide
SVSLHLLSPGSHSLFTRAILQSGSFNAPWAVTSLYEARNR

SEQ ID NO: 19976 - protein, 40 aa, Artificial sequence
  synthetic peptide
VSLHLLSPGSHSLFTRAILQSGSFNAPWAVTSLYEARNRT

SEQ ID NO: 19977 - protein, 40 aa, Artificial sequence
  synthetic peptide
SLHLLSPGSHSLFTRAILQSGSFNAPWAVTSLYEARNRTL

SEQ ID NO: 19978 - protein, 40 aa, Artificial sequence
  synthetic peptide
LHLLSPGSHSLFTRAILQSGSFNAPWAVTSLYEARNRTLN

SEQ ID NO: 19979 - protein, 40 aa, Artificial sequence
  synthetic peptide
HLLSPGSHSLFTRAILQSGSFNAPWAVTSLYEARNRTLNL

SEQ ID NO: 19980 - protein, 40 aa, Artificial sequence
  synthetic peptide
LLSPGSHSLFTRAILQSGSFNAPWAVTSLYEARNRTLNLA

SEQ ID NO: 19981 - protein, 40 aa, Artificial sequence
  synthetic peptide
LSPGSHSLFTRAILQSGSFNAPWAVTSLYEARNRTLNLAK

SEQ ID NO: 19982 - protein, 40 aa, Artificial sequence
  synthetic peptide
SPGSHSLFTRAILQSGSFNAPWAVTSLYEARNRTLNLAKL

SEQ ID NO: 19983 - protein, 40 aa, Artificial sequence
  synthetic peptide
PGSHSLFTRAILQSGSFNAPWAVTSLYEARNRTLNLAKLT

SEQ ID NO: 19984 - protein, 40 aa, Artificial sequence
  synthetic peptide
GSHSLFTRAILQSGSFNAPWAVTSLYEARNRTLNLAKLTG

SEQ ID NO: 19985 - protein, 40 aa, Artificial sequence
  synthetic peptide
SHSLFTRAILQSGSFNAPWAVTSLYEARNRTLNLAKLTGC

SEQ ID NO: 19986 - protein, 40 aa, Artificial sequence
  synthetic peptide
HSLFTRAILQSGSFNAPWAVTSLYEARNRTLNLAKLTGCS

SEQ ID NO: 19987 - protein, 40 aa, Artificial sequence
  synthetic peptide
SLFTRAILQSGSFNAPWAVTSLYEARNRTLNLAKLTGCSR

SEQ ID NO: 19988 - protein, 40 aa, Artificial sequence
  synthetic peptide
LFTRAILQSGSFNAPWAVTSLYEARNRTLNLAKLTGCSRE

SEQ ID NO: 19989 - protein, 40 aa, Artificial sequence
  synthetic peptide
FTRAILQSGSFNAPWAVTSLYEARNRTLNLAKLTGCSREN

SEQ ID NO: 19990 - protein, 40 aa, Artificial sequence
  synthetic peptide
TRAILQSGSFNAPWAVTSLYEARNRTLNLAKLTGCSRENE

SEQ ID NO: 19991 - protein, 40 aa, Artificial sequence
  synthetic peptide
RAILQSGSFNAPWAVTSLYEARNRTLNLAKLTGCSRENET

SEQ ID NO: 19992 - protein, 40 aa, Artificial sequence
  synthetic peptide
AILQSGSFNAPWAVTSLYEARNRTLNLAKLTGCSRENETE

SEQ ID NO: 19993 - protein, 40 aa, Artificial sequence
  synthetic peptide
ILQSGSFNAPWAVTSLYEARNRTLNLAKLTGCSRENETEI

SEQ ID NO: 19994 - protein, 40 aa, Artificial sequence
  synthetic peptide
LQSGSFNAPWAVTSLYEARNRTLNLAKLTGCSRENETEII

SEQ ID NO: 19995 - protein, 40 aa, Artificial sequence
  synthetic peptide
QSGSFNAPWAVTSLYEARNRTLNLAKLTGCSRENETEIIK

SEQ ID NO: 19996 - protein, 40 aa, Artificial sequence
  synthetic peptide
SGSFNAPWAVTSLYEARNRTLNLAKLTGCSRENETEIIKC

SEQ ID NO: 19997 - protein, 40 aa, Artificial sequence
  synthetic peptide
GSFNAPWAVTSLYEARNRTLNLAKLTGCSRENETEIIKCL

SEQ ID NO: 19998 - protein, 40 aa, Artificial sequence
  synthetic peptide
SFNAPWAVTSLYEARNRTLNLAKLTGCSRENETEIIKCLR

SEQ ID NO: 19999 - protein, 40 aa, Artificial sequence
  synthetic peptide
FNAPWAVTSLYEARNRTLNLAKLTGCSRENETEIIKCLRN

SEQ ID NO: 20000 - protein, 40 aa, Artificial sequence
  synthetic peptide
NAPWAVTSLYEARNRTLNLAKLTGCSRENETEIIKCLRNK

SEQ ID NO: 20001 - protein, 40 aa, Artificial sequence
  synthetic peptide
APWAVTSLYEARNRTLNLAKLTGCSRENETEIIKCLRNKD

SEQ ID NO: 20002 - protein, 40 aa, Artificial sequence
  synthetic peptide
PWAVTSLYEARNRTLNLAKLTGCSRENETEIIKCLRNKDP

SEQ ID NO: 20003 - protein, 40 aa, Artificial sequence
  synthetic peptide
WAVTSLYEARNRTLNLAKLTGCSRENETEIIKCLRNKDPQ

SEQ ID NO: 20004 - protein, 40 aa, Artificial sequence
  synthetic peptide
AVTSLYEARNRTLNLAKLTGCSRENETEIIKCLRNKDPQE

SEQ ID NO: 20005 - protein, 40 aa, Artificial sequence
  synthetic peptide
VTSLYEARNRTLNLAKLTGCSRENETEIIKCLRNKDPQEI

SEQ ID NO: 20006 - protein, 40 aa, Artificial sequence
  synthetic peptide
TSLYEARNRTLNLAKLTGCSRENETEIIKCLRNKDPQEIL

SEQ ID NO: 20007 - protein, 40 aa, Artificial sequence
  synthetic peptide
SLYEARNRTLNLAKLTGCSRENETEIIKCLRNKDPQEILL

SEQ ID NO: 20008 - protein, 40 aa, Artificial sequence
  synthetic peptide
LYEARNRTLNLAKLTGCSRENETEIIKCLRNKDPQEILLN

SEQ ID NO: 20009 - protein, 40 aa, Artificial sequence
  synthetic peptide
YEARNRTLNLAKLTGCSRENETEIIKCLRNKDPQEILLNE

SEQ ID NO: 20010 - protein, 40 aa, Artificial sequence
  synthetic peptide
EARNRTLNLAKLTGCSRENETEIIKCLRNKDPQEILLNEA

SEQ ID NO: 20011 - protein, 40 aa, Artificial sequence
  synthetic peptide
ARNRTLNLAKLTGCSRENETEIIKCLRNKDPQEILLNEAF

SEQ ID NO: 20012 - protein, 40 aa, Artificial sequence
  synthetic peptide
RNRTLNLAKLTGCSRENETEIIKCLRNKDPQEILLNEAFV

SEQ ID NO: 20013 - protein, 40 aa, Artificial sequence
  synthetic peptide
NRTLNLAKLTGCSRENETEIIKCLRNKDPQEILLNEAFVV

SEQ ID NO: 20014 - protein, 40 aa, Artificial sequence
  synthetic peptide
RTLNLAKLTGCSRENETEIIKCLRNKDPQEILLNEAFVVP

SEQ ID NO: 20015 - protein, 40 aa, Artificial sequence
  synthetic peptide
TLNLAKLTGCSRENETEIIKCLRNKDPQEILLNEAFVVPY

SEQ ID NO: 20016 - protein, 40 aa, Artificial sequence
  synthetic peptide
LNLAKLTGCSRENETEIIKCLRNKDPQEILLNEAFVVPYG

SEQ ID NO: 20017 - protein, 40 aa, Artificial sequence
  synthetic peptide
NLAKLTGCSRENETEIIKCLRNKDPQEILLNEAFVVPYGT

SEQ ID NO: 20018 - protein, 40 aa, Artificial sequence
  synthetic peptide
LAKLTGCSRENETEIIKCLRNKDPQEILLNEAFVVPYGTP

SEQ ID NO: 20019 - protein, 40 aa, Artificial sequence
  synthetic peptide
AKLTGCSRENETEIIKCLRNKDPQEILLNEAFVVPYGTPL

SEQ ID NO: 20020 - protein, 40 aa, Artificial sequence
  synthetic peptide
KLTGCSRENETEIIKCLRNKDPQEILLNEAFVVPYGTPLS

SEQ ID NO: 20021 - protein, 40 aa, Artificial sequence
  synthetic peptide
LTGCSRENETEIIKCLRNKDPQEILLNEAFVVPYGTPLSV

SEQ ID NO: 20022 - protein, 40 aa, Artificial sequence
  synthetic peptide
TGCSRENETEIIKCLRNKDPQEILLNEAFVVPYGTPLSVN

SEQ ID NO: 20023 - protein, 40 aa, Artificial sequence
  synthetic peptide
GCSRENETEIIKCLRNKDPQEILLNEAFVVPYGTPLSVNF

SEQ ID NO: 20024 - protein, 40 aa, Artificial sequence
  synthetic peptide
CSRENETEIIKCLRNKDPQEILLNEAFVVPYGTPLSVNFG

SEQ ID NO: 20025 - protein, 40 aa, Artificial sequence
  synthetic peptide
SRENETEIIKCLRNKDPQEILLNEAFVVPYGTPLSVNFGP

SEQ ID NO: 20026 - protein, 40 aa, Artificial sequence
  synthetic peptide
RENETEIIKCLRNKDPQEILLNEAFVVPYGTPLSVNFGPT

SEQ ID NO: 20027 - protein, 40 aa, Artificial sequence
  synthetic peptide
ENETEIIKCLRNKDPQEILLNEAFVVPYGTPLSVNFGPTV

SEQ ID NO: 20028 - protein, 40 aa, Artificial sequence
  synthetic peptide
NETEIIKCLRNKDPQEILLNEAFVVPYGTPLSVNFGPTVD

SEQ ID NO: 20029 - protein, 40 aa, Artificial sequence
  synthetic peptide
ETEIIKCLRNKDPQEILLNEAFVVPYGTPLSVNFGPTVDG

SEQ ID NO: 20030 - protein, 40 aa, Artificial sequence
  synthetic peptide
TEIIKCLRNKDPQEILLNEAFVVPYGTPLSVNFGPTVDGD

SEQ ID NO: 20031 - protein, 40 aa, Artificial sequence
  synthetic peptide
EIIKCLRNKDPQEILLNEAFVVPYGTPLSVNFGPTVDGDF

SEQ ID NO: 20032 - protein, 40 aa, Artificial sequence
  synthetic peptide
IIKCLRNKDPQEILLNEAFVVPYGTPLSVNFGPTVDGDFL

SEQ ID NO: 20033 - protein, 40 aa, Artificial sequence
  synthetic peptide
IKCLRNKDPQEILLNEAFVVPYGTPLSVNFGPTVDGDFLT

SEQ ID NO: 20034 - protein, 40 aa, Artificial sequence
  synthetic peptide
KCLRNKDPQEILLNEAFVVPYGTPLSVNFGPTVDGDFLTD

SEQ ID NO: 20035 - protein, 40 aa, Artificial sequence
  synthetic peptide
CLRNKDPQEILLNEAFVVPYGTPLSVNFGPTVDGDFLTDM

SEQ ID NO: 20036 - protein, 40 aa, Artificial sequence
  synthetic peptide
LRNKDPQEILLNEAFVVPYGTPLSVNFGPTVDGDFLTDMP

SEQ ID NO: 20037 - protein, 40 aa, Artificial sequence
  synthetic peptide
RNKDPQEILLNEAFVVPYGTPLSVNFGPTVDGDFLTDMPD

SEQ ID NO: 20038 - protein, 40 aa, Artificial sequence
  synthetic peptide
NKDPQEILLNEAFVVPYGTPLSVNFGPTVDGDFLTDMPDI

SEQ ID NO: 20039 - protein, 40 aa, Artificial sequence
  synthetic peptide
KDPQEILLNEAFVVPYGTPLSVNFGPTVDGDFLTDMPDIL

SEQ ID NO: 20040 - protein, 40 aa, Artificial sequence
  synthetic peptide
DPQEILLNEAFVVPYGTPLSVNFGPTVDGDFLTDMPDILL

SEQ ID NO: 20041 - protein, 40 aa, Artificial sequence
  synthetic peptide
PQEILLNEAFVVPYGTPLSVNFGPTVDGDFLTDMPDILLE

SEQ ID NO: 20042 - protein, 40 aa, Artificial sequence
  synthetic peptide
QEILLNEAFVVPYGTPLSVNFGPTVDGDFLTDMPDILLEL

SEQ ID NO: 20043 - protein, 40 aa, Artificial sequence
  synthetic peptide
EILLNEAFVVPYGTPLSVNFGPTVDGDFLTDMPDILLELG

SEQ ID NO: 20044 - protein, 40 aa, Artificial sequence
  synthetic peptide
ILLNEAFVVPYGTPLSVNFGPTVDGDFLTDMPDILLELGQ

SEQ ID NO: 20045 - protein, 40 aa, Artificial sequence
  synthetic peptide
LLNEAFVVPYGTPLSVNFGPTVDGDFLTDMPDILLELGQF

SEQ ID NO: 20046 - protein, 40 aa, Artificial sequence
  synthetic peptide
LNEAFVVPYGTPLSVNFGPTVDGDFLTDMPDILLELGQFK

SEQ ID NO: 20047 - protein, 40 aa, Artificial sequence
  synthetic peptide
NEAFVVPYGTPLSVNFGPTVDGDFLTDMPDILLELGQFKK

SEQ ID NO: 20048 - protein, 40 aa, Artificial sequence
  synthetic peptide
EAFVVPYGTPLSVNFGPTVDGDFLTDMPDILLELGQFKKT

SEQ ID NO: 20049 - protein, 40 aa, Artificial sequence
  synthetic peptide
AFVVPYGTPLSVNFGPTVDGDFLTDMPDILLELGQFKKTQ

SEQ ID NO: 20050 - protein, 40 aa, Artificial sequence
  synthetic peptide
FVVPYGTPLSVNFGPTVDGDFLTDMPDILLELGQFKKTQI

SEQ ID NO: 20051 - protein, 40 aa, Artificial sequence
  synthetic peptide
VVPYGTPLSVNFGPTVDGDFLTDMPDILLELGQFKKTQIL

SEQ ID NO: 20052 - protein, 40 aa, Artificial sequence
  synthetic peptide
VPYGTPLSVNFGPTVDGDFLTDMPDILLELGQFKKTQILV

SEQ ID NO: 20053 - protein, 40 aa, Artificial sequence
  synthetic peptide
PYGTPLSVNFGPTVDGDFLTDMPDILLELGQFKKTQILVG

SEQ ID NO: 20054 - protein, 40 aa, Artificial sequence
  synthetic peptide
YGTPLSVNFGPTVDGDFLTDMPDILLELGQFKKTQILVGV

SEQ ID NO: 20055 - protein, 40 aa, Artificial sequence
  synthetic peptide
GTPLSVNFGPTVDGDFLTDMPDILLELGQFKKTQILVGVN

SEQ ID NO: 20056 - protein, 40 aa, Artificial sequence
  synthetic peptide
TPLSVNFGPTVDGDFLTDMPDILLELGQFKKTQILVGVNK

SEQ ID NO: 20057 - protein, 40 aa, Artificial sequence
  synthetic peptide
PLSVNFGPTVDGDFLTDMPDILLELGQFKKTQILVGVNKD

SEQ ID NO: 20058 - protein, 40 aa, Artificial sequence
  synthetic peptide
LSVNFGPTVDGDFLTDMPDILLELGQFKKTQILVGVNKDE

SEQ ID NO: 20059 - protein, 40 aa, Artificial sequence
  synthetic peptide
SVNFGPTVDGDFLTDMPDILLELGQFKKTQILVGVNKDEG

SEQ ID NO: 20060 - protein, 40 aa, Artificial sequence
  synthetic peptide
VNFGPTVDGDFLTDMPDILLELGQFKKTQILVGVNKDEGT

SEQ ID NO: 20061 - protein, 40 aa, Artificial sequence
  synthetic peptide
NFGPTVDGDFLTDMPDILLELGQFKKTQILVGVNKDEGTA

SEQ ID NO: 20062 - protein, 40 aa, Artificial sequence
  synthetic peptide
FGPTVDGDFLTDMPDILLELGQFKKTQILVGVNKDEGTAF

SEQ ID NO: 20063 - protein, 40 aa, Artificial sequence
  synthetic peptide
GPTVDGDFLTDMPDILLELGQFKKTQILVGVNKDEGTAFL

SEQ ID NO: 20064 - protein, 40 aa, Artificial sequence
  synthetic peptide
PTVDGDFLTDMPDILLELGQFKKTQILVGVNKDEGTAFLV

SEQ ID NO: 20065 - protein, 40 aa, Artificial sequence
  synthetic peptide
TVDGDFLTDMPDILLELGQFKKTQILVGVNKDEGTAFLVY

SEQ ID NO: 20066 - protein, 40 aa, Artificial sequence
  synthetic peptide
VDGDFLTDMPDILLELGQFKKTQILVGVNKDEGTAFLVYG

SEQ ID NO: 20067 - protein, 40 aa, Artificial sequence
  synthetic peptide
DGDFLTDMPDILLELGQFKKTQILVGVNKDEGTAFLVYGA

SEQ ID NO: 20068 - protein, 40 aa, Artificial sequence
  synthetic peptide
GDFLTDMPDILLELGQFKKTQILVGVNKDEGTAFLVYGAP

SEQ ID NO: 20069 - protein, 40 aa, Artificial sequence
  synthetic peptide
DFLTDMPDILLELGQFKKTQILVGVNKDEGTAFLVYGAPG

SEQ ID NO: 20070 - protein, 40 aa, Artificial sequence
  synthetic peptide
FLTDMPDILLELGQFKKTQILVGVNKDEGTAFLVYGAPGF

SEQ ID NO: 20071 - protein, 40 aa, Artificial sequence
  synthetic peptide
LTDMPDILLELGQFKKTQILVGVNKDEGTAFLVYGAPGFS

SEQ ID NO: 20072 - protein, 40 aa, Artificial sequence
  synthetic peptide
TDMPDILLELGQFKKTQILVGVNKDEGTAFLVYGAPGFSK

SEQ ID NO: 20073 - protein, 40 aa, Artificial sequence
  synthetic peptide
DMPDILLELGQFKKTQILVGVNKDEGTAFLVYGAPGFSKD

SEQ ID NO: 20074 - protein, 40 aa, Artificial sequence
  synthetic peptide
MPDILLELGQFKKTQILVGVNKDEGTAFLVYGAPGFSKDN

SEQ ID NO: 20075 - protein, 40 aa, Artificial sequence
  synthetic peptide
PDILLELGQFKKTQILVGVNKDEGTAFLVYGAPGFSKDNN

SEQ ID NO: 20076 - protein, 40 aa, Artificial sequence
  synthetic peptide
DILLELGQFKKTQILVGVNKDEGTAFLVYGAPGFSKDNNS

SEQ ID NO: 20077 - protein, 40 aa, Artificial sequence
  synthetic peptide
ILLELGQFKKTQILVGVNKDEGTAFLVYGAPGFSKDNNSI

SEQ ID NO: 20078 - protein, 40 aa, Artificial sequence
  synthetic peptide
LLELGQFKKTQILVGVNKDEGTAFLVYGAPGFSKDNNSII

SEQ ID NO: 20079 - protein, 40 aa, Artificial sequence
  synthetic peptide
LELGQFKKTQILVGVNKDEGTAFLVYGAPGFSKDNNSIIT

SEQ ID NO: 20080 - protein, 40 aa, Artificial sequence
  synthetic peptide
ELGQFKKTQILVGVNKDEGTAFLVYGAPGFSKDNNSIITR

SEQ ID NO: 20081 - protein, 40 aa, Artificial sequence
  synthetic peptide
LGQFKKTQILVGVNKDEGTAFLVYGAPGFSKDNNSIITRK

SEQ ID NO: 20082 - protein, 40 aa, Artificial sequence
  synthetic peptide
GQFKKTQILVGVNKDEGTAFLVYGAPGFSKDNNSIITRKE

SEQ ID NO: 20083 - protein, 40 aa, Artificial sequence
  synthetic peptide
QFKKTQILVGVNKDEGTAFLVYGAPGFSKDNNSIITRKEF

SEQ ID NO: 20084 - protein, 40 aa, Artificial sequence
  synthetic peptide
FKKTQILVGVNKDEGTAFLVYGAPGFSKDNNSIITRKEFQ

SEQ ID NO: 20085 - protein, 40 aa, Artificial sequence
  synthetic peptide
KKTQILVGVNKDEGTAFLVYGAPGFSKDNNSIITRKEFQE

SEQ ID NO: 20086 - protein, 40 aa, Artificial sequence
  synthetic peptide
KTQILVGVNKDEGTAFLVYGAPGFSKDNNSIITRKEFQEG

SEQ ID NO: 20087 - protein, 40 aa, Artificial sequence
  synthetic peptide
TQILVGVNKDEGTAFLVYGAPGFSKDNNSIITRKEFQEGL

SEQ ID NO: 20088 - protein, 40 aa, Artificial sequence
  synthetic peptide
QILVGVNKDEGTAFLVYGAPGFSKDNNSIITRKEFQEGLK

SEQ ID NO: 20089 - protein, 40 aa, Artificial sequence
  synthetic peptide
ILVGVNKDEGTAFLVYGAPGFSKDNNSIITRKEFQEGLKI

SEQ ID NO: 20090 - protein, 40 aa, Artificial sequence
  synthetic peptide
LVGVNKDEGTAFLVYGAPGFSKDNNSIITRKEFQEGLKIF

SEQ ID NO: 20091 - protein, 40 aa, Artificial sequence
  synthetic peptide
VGVNKDEGTAFLVYGAPGFSKDNNSIITRKEFQEGLKIFF

SEQ ID NO: 20092 - protein, 40 aa, Artificial sequence
  synthetic peptide
GVNKDEGTAFLVYGAPGFSKDNNSIITRKEFQEGLKIFFP

SEQ ID NO: 20093 - protein, 40 aa, Artificial sequence
  synthetic peptide
VNKDEGTAFLVYGAPGFSKDNNSIITRKEFQEGLKIFFPG

SEQ ID NO: 20094 - protein, 40 aa, Artificial sequence
  synthetic peptide
NKDEGTAFLVYGAPGFSKDNNSIITRKEFQEGLKIFFPGV

SEQ ID NO: 20095 - protein, 40 aa, Artificial sequence
  synthetic peptide
KDEGTAFLVYGAPGFSKDNNSIITRKEFQEGLKIFFPGVS

SEQ ID NO: 20096 - protein, 40 aa, Artificial sequence
  synthetic peptide
DEGTAFLVYGAPGFSKDNNSIITRKEFQEGLKIFFPGVSE

SEQ ID NO: 20097 - protein, 40 aa, Artificial sequence
  synthetic peptide
EGTAFLVYGAPGFSKDNNSIITRKEFQEGLKIFFPGVSEF

SEQ ID NO: 20098 - protein, 40 aa, Artificial sequence
  synthetic peptide
GTAFLVYGAPGFSKDNNSIITRKEFQEGLKIFFPGVSEFG

SEQ ID NO: 20099 - protein, 40 aa, Artificial sequence
  synthetic peptide
TAFLVYGAPGFSKDNNSIITRKEFQEGLKIFFPGVSEFGK

SEQ ID NO: 20100 - protein, 40 aa, Artificial sequence
  synthetic peptide
AFLVYGAPGFSKDNNSIITRKEFQEGLKIFFPGVSEFGKE

SEQ ID NO: 20101 - protein, 40 aa, Artificial sequence
  synthetic peptide
FLVYGAPGFSKDNNSIITRKEFQEGLKIFFPGVSEFGKES

SEQ ID NO: 20102 - protein, 40 aa, Artificial sequence
  synthetic peptide
LVYGAPGFSKDNNSIITRKEFQEGLKIFFPGVSEFGKESI

SEQ ID NO: 20103 - protein, 40 aa, Artificial sequence
  synthetic peptide
VYGAPGFSKDNNSIITRKEFQEGLKIFFPGVSEFGKESIL

SEQ ID NO: 20104 - protein, 40 aa, Artificial sequence
  synthetic peptide
YGAPGFSKDNNSIITRKEFQEGLKIFFPGVSEFGKESILF

SEQ ID NO: 20105 - protein, 40 aa, Artificial sequence
  synthetic peptide
GAPGFSKDNNSIITRKEFQEGLKIFFPGVSEFGKESILFH

SEQ ID NO: 20106 - protein, 40 aa, Artificial sequence
  synthetic peptide
APGFSKDNNSIITRKEFQEGLKIFFPGVSEFGKESILFHY

SEQ ID NO: 20107 - protein, 40 aa, Artificial sequence
  synthetic peptide
PGFSKDNNSIITRKEFQEGLKIFFPGVSEFGKESILFHYT

SEQ ID NO: 20108 - protein, 40 aa, Artificial sequence
  synthetic peptide
GFSKDNNSIITRKEFQEGLKIFFPGVSEFGKESILFHYTD

SEQ ID NO: 20109 - protein, 40 aa, Artificial sequence
  synthetic peptide
FSKDNNSIITRKEFQEGLKIFFPGVSEFGKESILFHYTDW

SEQ ID NO: 20110 - protein, 40 aa, Artificial sequence
  synthetic peptide
SKDNNSIITRKEFQEGLKIFFPGVSEFGKESILFHYTDWV

SEQ ID NO: 20111 - protein, 40 aa, Artificial sequence
  synthetic peptide
KDNNSIITRKEFQEGLKIFFPGVSEFGKESILFHYTDWVD

SEQ ID NO: 20112 - protein, 40 aa, Artificial sequence
  synthetic peptide
DNNSIITRKEFQEGLKIFFPGVSEFGKESILFHYTDWVDD

SEQ ID NO: 20113 - protein, 40 aa, Artificial sequence
  synthetic peptide
NNSIITRKEFQEGLKIFFPGVSEFGKESILFHYTDWVDDQ

SEQ ID NO: 20114 - protein, 40 aa, Artificial sequence
  synthetic peptide
NSIITRKEFQEGLKIFFPGVSEFGKESILFHYTDWVDDQR

SEQ ID NO: 20115 - protein, 40 aa, Artificial sequence
  synthetic peptide
SIITRKEFQEGLKIFFPGVSEFGKESILFHYTDWVDDQRP

SEQ ID NO: 20116 - protein, 40 aa, Artificial sequence
  synthetic peptide
IITRKEFQEGLKIFFPGVSEFGKESILFHYTDWVDDQRPE

SEQ ID NO: 20117 - protein, 40 aa, Artificial sequence
  synthetic peptide
ITRKEFQEGLKIFFPGVSEFGKESILFHYTDWVDDQRPEN

SEQ ID NO: 20118 - protein, 40 aa, Artificial sequence
  synthetic peptide
TRKEFQEGLKIFFPGVSEFGKESILFHYTDWVDDQRPENY

SEQ ID NO: 20119 - protein, 40 aa, Artificial sequence
  synthetic peptide
RKEFQEGLKIFFPGVSEFGKESILFHYTDWVDDQRPENYR

SEQ ID NO: 20120 - protein, 40 aa, Artificial sequence
  synthetic peptide
KEFQEGLKIFFPGVSEFGKESILFHYTDWVDDQRPENYRE

SEQ ID NO: 20121 - protein, 40 aa, Artificial sequence
  synthetic peptide
EFQEGLKIFFPGVSEFGKESILFHYTDWVDDQRPENYREA

SEQ ID NO: 20122 - protein, 40 aa, Artificial sequence
  synthetic peptide
FQEGLKIFFPGVSEFGKESILFHYTDWVDDQRPENYREAL

SEQ ID NO: 20123 - protein, 40 aa, Artificial sequence
  synthetic peptide
QEGLKIFFPGVSEFGKESILFHYTDWVDDQRPENYREALG

SEQ ID NO: 20124 - protein, 40 aa, Artificial sequence
  synthetic peptide
EGLKIFFPGVSEFGKESILFHYTDWVDDQRPENYREALGD

SEQ ID NO: 20125 - protein, 40 aa, Artificial sequence
  synthetic peptide
GLKIFFPGVSEFGKESILFHYTDWVDDQRPENYREALGDV

SEQ ID NO: 20126 - protein, 40 aa, Artificial sequence
  synthetic peptide
LKIFFPGVSEFGKESILFHYTDWVDDQRPENYREALGDVV

SEQ ID NO: 20127 - protein, 40 aa, Artificial sequence
  synthetic peptide
KIFFPGVSEFGKESILFHYTDWVDDQRPENYREALGDVVG

SEQ ID NO: 20128 - protein, 40 aa, Artificial sequence
  synthetic peptide
IFFPGVSEFGKESILFHYTDWVDDQRPENYREALGDVVGD

SEQ ID NO: 20129 - protein, 40 aa, Artificial sequence
  synthetic peptide
FFPGVSEFGKESILFHYTDWVDDQRPENYREALGDVVGDY

SEQ ID NO: 20130 - protein, 40 aa, Artificial sequence
  synthetic peptide
FPGVSEFGKESILFHYTDWVDDQRPENYREALGDVVGDYN

SEQ ID NO: 20131 - protein, 40 aa, Artificial sequence
  synthetic peptide
PGVSEFGKESILFHYTDWVDDQRPENYREALGDVVGDYNF

SEQ ID NO: 20132 - protein, 40 aa, Artificial sequence
  synthetic peptide
GVSEFGKESILFHYTDWVDDQRPENYREALGDVVGDYNFI

SEQ ID NO: 20133 - protein, 40 aa, Artificial sequence
  synthetic peptide
VSEFGKESILFHYTDWVDDQRPENYREALGDVVGDYNFIC

SEQ ID NO: 20134 - protein, 40 aa, Artificial sequence
  synthetic peptide
SEFGKESILFHYTDWVDDQRPENYREALGDVVGDYNFICP

SEQ ID NO: 20135 - protein, 40 aa, Artificial sequence
  synthetic peptide
EFGKESILFHYTDWVDDQRPENYREALGDVVGDYNFICPA

SEQ ID NO: 20136 - protein, 40 aa, Artificial sequence
  synthetic peptide
FGKESILFHYTDWVDDQRPENYREALGDVVGDYNFICPAL

SEQ ID NO: 20137 - protein, 40 aa, Artificial sequence
  synthetic peptide
GKESILFHYTDWVDDQRPENYREALGDVVGDYNFICPALE

SEQ ID NO: 20138 - protein, 40 aa, Artificial sequence
  synthetic peptide
KESILFHYTDWVDDQRPENYREALGDVVGDYNFICPALEF

SEQ ID NO: 20139 - protein, 40 aa, Artificial sequence
  synthetic peptide
ESILFHYTDWVDDQRPENYREALGDVVGDYNFICPALEFT

SEQ ID NO: 20140 - protein, 40 aa, Artificial sequence
  synthetic peptide
SILFHYTDWVDDQRPENYREALGDVVGDYNFICPALEFTK

SEQ ID NO: 20141 - protein, 40 aa, Artificial sequence
  synthetic peptide
ILFHYTDWVDDQRPENYREALGDVVGDYNFICPALEFTKK

SEQ ID NO: 20142 - protein, 40 aa, Artificial sequence
  synthetic peptide
LFHYTDWVDDQRPENYREALGDVVGDYNFICPALEFTKKF

SEQ ID NO: 20143 - protein, 40 aa, Artificial sequence
  synthetic peptide
FHYTDWVDDQRPENYREALGDVVGDYNFICPALEFTKKFS

SEQ ID NO: 20144 - protein, 40 aa, Artificial sequence
  synthetic peptide
HYTDWVDDQRPENYREALGDVVGDYNFICPALEFTKKFSE

SEQ ID NO: 20145 - protein, 40 aa, Artificial sequence
  synthetic peptide
YTDWVDDQRPENYREALGDVVGDYNFICPALEFTKKFSEW

SEQ ID NO: 20146 - protein, 40 aa, Artificial sequence
  synthetic peptide
TDWVDDQRPENYREALGDVVGDYNFICPALEFTKKFSEWG

SEQ ID NO: 20147 - protein, 40 aa, Artificial sequence
  synthetic peptide
DWVDDQRPENYREALGDVVGDYNFICPALEFTKKFSEWGN

SEQ ID NO: 20148 - protein, 40 aa, Artificial sequence
  synthetic peptide
WVDDQRPENYREALGDVVGDYNFICPALEFTKKFSEWGNN

SEQ ID NO: 20149 - protein, 40 aa, Artificial sequence
  synthetic peptide
VDDQRPENYREALGDVVGDYNFICPALEFTKKFSEWGNNA

SEQ ID NO: 20150 - protein, 40 aa, Artificial sequence
  synthetic peptide
DDQRPENYREALGDVVGDYNFICPALEFTKKFSEWGNNAF

SEQ ID NO: 20151 - protein, 40 aa, Artificial sequence
  synthetic peptide
DQRPENYREALGDVVGDYNFICPALEFTKKFSEWGNNAFF

SEQ ID NO: 20152 - protein, 40 aa, Artificial sequence
  synthetic peptide
QRPENYREALGDVVGDYNFICPALEFTKKFSEWGNNAFFY

SEQ ID NO: 20153 - protein, 40 aa, Artificial sequence
  synthetic peptide
RPENYREALGDVVGDYNFICPALEFTKKFSEWGNNAFFYY

SEQ ID NO: 20154 - protein, 40 aa, Artificial sequence
  synthetic peptide
PENYREALGDVVGDYNFICPALEFTKKFSEWGNNAFFYYF

SEQ ID NO: 20155 - protein, 40 aa, Artificial sequence
  synthetic peptide
ENYREALGDVVGDYNFICPALEFTKKFSEWGNNAFFYYFE

SEQ ID NO: 20156 - protein, 40 aa, Artificial sequence
  synthetic peptide
NYREALGDVVGDYNFICPALEFTKKFSEWGNNAFFYYFEH

SEQ ID NO: 20157 - protein, 40 aa, Artificial sequence
  synthetic peptide
YREALGDVVGDYNFICPALEFTKKFSEWGNNAFFYYFEHR

SEQ ID NO: 20158 - protein, 40 aa, Artificial sequence
  synthetic peptide
REALGDVVGDYNFICPALEFTKKFSEWGNNAFFYYFEHRS

SEQ ID NO: 20159 - protein, 40 aa, Artificial sequence
  synthetic peptide
EALGDVVGDYNFICPALEFTKKFSEWGNNAFFYYFEHRSS

SEQ ID NO: 20160 - protein, 40 aa, Artificial sequence
  synthetic peptide
ALGDVVGDYNFICPALEFTKKFSEWGNNAFFYYFEHRSSK

SEQ ID NO: 20161 - protein, 40 aa, Artificial sequence
  synthetic peptide
LGDVVGDYNFICPALEFTKKFSEWGNNAFFYYFEHRSSKL

SEQ ID NO: 20162 - protein, 40 aa, Artificial sequence
  synthetic peptide
GDVVGDYNFICPALEFTKKFSEWGNNAFFYYFEHRSSKLP

SEQ ID NO: 20163 - protein, 40 aa, Artificial sequence
  synthetic peptide
DVVGDYNFICPALEFTKKFSEWGNNAFFYYFEHRSSKLPW

SEQ ID NO: 20164 - protein, 40 aa, Artificial sequence
  synthetic peptide
VVGDYNFICPALEFTKKFSEWGNNAFFYYFEHRSSKLPWP

SEQ ID NO: 20165 - protein, 40 aa, Artificial sequence
  synthetic peptide
VGDYNFICPALEFTKKFSEWGNNAFFYYFEHRSSKLPWPE

SEQ ID NO: 20166 - protein, 40 aa, Artificial sequence
  synthetic peptide
GDYNFICPALEFTKKFSEWGNNAFFYYFEHRSSKLPWPEW

SEQ ID NO: 20167 - protein, 40 aa, Artificial sequence
  synthetic peptide
DYNFICPALEFTKKFSEWGNNAFFYYFEHRSSKLPWPEWM

SEQ ID NO: 20168 - protein, 40 aa, Artificial sequence
  synthetic peptide
YNFICPALEFTKKFSEWGNNAFFYYFEHRSSKLPWPEWMG

SEQ ID NO: 20169 - protein, 40 aa, Artificial sequence
  synthetic peptide
NFICPALEFTKKFSEWGNNAFFYYFEHRSSKLPWPEWMGV

SEQ ID NO: 20170 - protein, 40 aa, Artificial sequence
  synthetic peptide
FICPALEFTKKFSEWGNNAFFYYFEHRSSKLPWPEWMGVM

SEQ ID NO: 20171 - protein, 40 aa, Artificial sequence
  synthetic peptide
ICPALEFTKKFSEWGNNAFFYYFEHRSSKLPWPEWMGVMH

SEQ ID NO: 20172 - protein, 40 aa, Artificial sequence
  synthetic peptide
CPALEFTKKFSEWGNNAFFYYFEHRSSKLPWPEWMGVMHG

SEQ ID NO: 20173 - protein, 40 aa, Artificial sequence
  synthetic peptide
PALEFTKKFSEWGNNAFFYYFEHRSSKLPWPEWMGVMHGY

SEQ ID NO: 20174 - protein, 40 aa, Artificial sequence
  synthetic peptide
ALEFTKKFSEWGNNAFFYYFEHRSSKLPWPEWMGVMHGYE

SEQ ID NO: 20175 - protein, 40 aa, Artificial sequence
  synthetic peptide
LEFTKKFSEWGNNAFFYYFEHRSSKLPWPEWMGVMHGYEI

SEQ ID NO: 20176 - protein, 40 aa, Artificial sequence
  synthetic peptide
EFTKKFSEWGNNAFFYYFEHRSSKLPWPEWMGVMHGYEIE

SEQ ID NO: 20177 - protein, 40 aa, Artificial sequence
  synthetic peptide
FTKKFSEWGNNAFFYYFEHRSSKLPWPEWMGVMHGYEIEF

SEQ ID NO: 20178 - protein, 40 aa, Artificial sequence
  synthetic peptide
TKKFSEWGNNAFFYYFEHRSSKLPWPEWMGVMHGYEIEFV

SEQ ID NO: 20179 - protein, 40 aa, Artificial sequence
  synthetic peptide
KKFSEWGNNAFFYYFEHRSSKLPWPEWMGVMHGYEIEFVF

SEQ ID NO: 20180 - protein, 40 aa, Artificial sequence
  synthetic peptide
KFSEWGNNAFFYYFEHRSSKLPWPEWMGVMHGYEIEFVFG

SEQ ID NO: 20181 - protein, 40 aa, Artificial sequence
  synthetic peptide
FSEWGNNAFFYYFEHRSSKLPWPEWMGVMHGYEIEFVFGL

SEQ ID NO: 20182 - protein, 40 aa, Artificial sequence
  synthetic peptide
SEWGNNAFFYYFEHRSSKLPWPEWMGVMHGYEIEFVFGLP

SEQ ID NO: 20183 - protein, 40 aa, Artificial sequence
  synthetic peptide
EWGNNAFFYYFEHRSSKLPWPEWMGVMHGYEIEFVFGLPL

SEQ ID NO: 20184 - protein, 40 aa, Artificial sequence
  synthetic peptide
WGNNAFFYYFEHRSSKLPWPEWMGVMHGYEIEFVFGLPLE

SEQ ID NO: 20185 - protein, 40 aa, Artificial sequence
  synthetic peptide
GNNAFFYYFEHRSSKLPWPEWMGVMHGYEIEFVFGLPLER

SEQ ID NO: 20186 - protein, 40 aa, Artificial sequence
  synthetic peptide
NNAFFYYFEHRSSKLPWPEWMGVMHGYEIEFVFGLPLERR

SEQ ID NO: 20187 - protein, 40 aa, Artificial sequence
  synthetic peptide
NAFFYYFEHRSSKLPWPEWMGVMHGYEIEFVFGLPLERRD

SEQ ID NO: 20188 - protein, 40 aa, Artificial sequence
  synthetic peptide
AFFYYFEHRSSKLPWPEWMGVMHGYEIEFVFGLPLERRDN

SEQ ID NO: 20189 - protein, 40 aa, Artificial sequence
  synthetic peptide
FFYYFEHRSSKLPWPEWMGVMHGYEIEFVFGLPLERRDNY

SEQ ID NO: 20190 - protein, 40 aa, Artificial sequence
  synthetic peptide
FYYFEHRSSKLPWPEWMGVMHGYEIEFVFGLPLERRDNYT

SEQ ID NO: 20191 - protein, 40 aa, Artificial sequence
  synthetic peptide
YYFEHRSSKLPWPEWMGVMHGYEIEFVFGLPLERRDNYTK

SEQ ID NO: 20192 - protein, 40 aa, Artificial sequence
  synthetic peptide
YFEHRSSKLPWPEWMGVMHGYEIEFVFGLPLERRDNYTKA

SEQ ID NO: 20193 - protein, 40 aa, Artificial sequence
  synthetic peptide
FEHRSSKLPWPEWMGVMHGYEIEFVFGLPLERRDNYTKAE

SEQ ID NO: 20194 - protein, 40 aa, Artificial sequence
  synthetic peptide
EHRSSKLPWPEWMGVMHGYEIEFVFGLPLERRDNYTKAEE

SEQ ID NO: 20195 - protein, 40 aa, Artificial sequence
  synthetic peptide
HRSSKLPWPEWMGVMHGYEIEFVFGLPLERRDNYTKAEEI

SEQ ID NO: 20196 - protein, 40 aa, Artificial sequence
  synthetic peptide
RSSKLPWPEWMGVMHGYEIEFVFGLPLERRDNYTKAEEIL

SEQ ID NO: 20197 - protein, 40 aa, Artificial sequence
  synthetic peptide
SSKLPWPEWMGVMHGYEIEFVFGLPLERRDNYTKAEEILS

SEQ ID NO: 20198 - protein, 40 aa, Artificial sequence
  synthetic peptide
SKLPWPEWMGVMHGYEIEFVFGLPLERRDNYTKAEEILSR

SEQ ID NO: 20199 - protein, 40 aa, Artificial sequence
  synthetic peptide
KLPWPEWMGVMHGYEIEFVFGLPLERRDNYTKAEEILSRS

SEQ ID NO: 20200 - protein, 40 aa, Artificial sequence
  synthetic peptide
LPWPEWMGVMHGYEIEFVFGLPLERRDNYTKAEEILSRSI

SEQ ID NO: 20201 - protein, 40 aa, Artificial sequence
  synthetic peptide
PWPEWMGVMHGYEIEFVFGLPLERRDNYTKAEEILSRSIV

SEQ ID NO: 20202 - protein, 40 aa, Artificial sequence
  synthetic peptide
WPEWMGVMHGYEIEFVFGLPLERRDNYTKAEEILSRSIVK

SEQ ID NO: 20203 - protein, 40 aa, Artificial sequence
  synthetic peptide
PEWMGVMHGYEIEFVFGLPLERRDNYTKAEEILSRSIVKR

SEQ ID NO: 20204 - protein, 40 aa, Artificial sequence
  synthetic peptide
EWMGVMHGYEIEFVFGLPLERRDNYTKAEEILSRSIVKRW

SEQ ID NO: 20205 - protein, 40 aa, Artificial sequence
  synthetic peptide
WMGVMHGYEIEFVFGLPLERRDNYTKAEEILSRSIVKRWA

SEQ ID NO: 20206 - protein, 40 aa, Artificial sequence
  synthetic peptide
MGVMHGYEIEFVFGLPLERRDNYTKAEEILSRSIVKRWAN

SEQ ID NO: 20207 - protein, 40 aa, Artificial sequence
  synthetic peptide
GVMHGYEIEFVFGLPLERRDNYTKAEEILSRSIVKRWANF

SEQ ID NO: 20208 - protein, 40 aa, Artificial sequence
  synthetic peptide
VMHGYEIEFVFGLPLERRDNYTKAEEILSRSIVKRWANFA

SEQ ID NO: 20209 - protein, 40 aa, Artificial sequence
  synthetic peptide
MHGYEIEFVFGLPLERRDNYTKAEEILSRSIVKRWANFAK

SEQ ID NO: 20210 - protein, 40 aa, Artificial sequence
  synthetic peptide
HGYEIEFVFGLPLERRDNYTKAEEILSRSIVKRWANFAKY

SEQ ID NO: 20211 - protein, 40 aa, Artificial sequence
  synthetic peptide
GYEIEFVFGLPLERRDNYTKAEEILSRSIVKRWANFAKYG

SEQ ID NO: 20212 - protein, 40 aa, Artificial sequence
  synthetic peptide
YEIEFVFGLPLERRDNYTKAEEILSRSIVKRWANFAKYGN

SEQ ID NO: 20213 - protein, 40 aa, Artificial sequence
  synthetic peptide
EIEFVFGLPLERRDNYTKAEEILSRSIVKRWANFAKYGNP

SEQ ID NO: 20214 - protein, 40 aa, Artificial sequence
  synthetic peptide
IEFVFGLPLERRDNYTKAEEILSRSIVKRWANFAKYGNPN

SEQ ID NO: 20215 - protein, 40 aa, Artificial sequence
  synthetic peptide
EFVFGLPLERRDNYTKAEEILSRSIVKRWANFAKYGNPNE

SEQ ID NO: 20216 - protein, 40 aa, Artificial sequence
  synthetic peptide
FVFGLPLERRDNYTKAEEILSRSIVKRWANFAKYGNPNET

SEQ ID NO: 20217 - protein, 40 aa, Artificial sequence
  synthetic peptide
VFGLPLERRDNYTKAEEILSRSIVKRWANFAKYGNPNETQ

SEQ ID NO: 20218 - protein, 40 aa, Artificial sequence
  synthetic peptide
FGLPLERRDNYTKAEEILSRSIVKRWANFAKYGNPNETQN

SEQ ID NO: 20219 - protein, 40 aa, Artificial sequence
  synthetic peptide
GLPLERRDNYTKAEEILSRSIVKRWANFAKYGNPNETQNN

SEQ ID NO: 20220 - protein, 40 aa, Artificial sequence
  synthetic peptide
LPLERRDNYTKAEEILSRSIVKRWANFAKYGNPNETQNNS

SEQ ID NO: 20221 - protein, 40 aa, Artificial sequence
  synthetic peptide
PLERRDNYTKAEEILSRSIVKRWANFAKYGNPNETQNNST

SEQ ID NO: 20222 - protein, 40 aa, Artificial sequence
  synthetic peptide
LERRDNYTKAEEILSRSIVKRWANFAKYGNPNETQNNSTS

SEQ ID NO: 20223 - protein, 40 aa, Artificial sequence
  synthetic peptide
ERRDNYTKAEEILSRSIVKRWANFAKYGNPNETQNNSTSW

SEQ ID NO: 20224 - protein, 40 aa, Artificial sequence
  synthetic peptide
RRDNYTKAEEILSRSIVKRWANFAKYGNPNETQNNSTSWP

SEQ ID NO: 20225 - protein, 40 aa, Artificial sequence
  synthetic peptide
RDNYTKAEEILSRSIVKRWANFAKYGNPNETQNNSTSWPV

SEQ ID NO: 20226 - protein, 40 aa, Artificial sequence
  synthetic peptide
DNYTKAEEILSRSIVKRWANFAKYGNPNETQNNSTSWPVF

SEQ ID NO: 20227 - protein, 40 aa, Artificial sequence
  synthetic peptide
NYTKAEEILSRSIVKRWANFAKYGNPNETQNNSTSWPVFK

SEQ ID NO: 20228 - protein, 40 aa, Artificial sequence
  synthetic peptide
YTKAEEILSRSIVKRWANFAKYGNPNETQNNSTSWPVFKS

SEQ ID NO: 20229 - protein, 40 aa, Artificial sequence
  synthetic peptide
TKAEEILSRSIVKRWANFAKYGNPNETQNNSTSWPVFKST

SEQ ID NO: 20230 - protein, 40 aa, Artificial sequence
  synthetic peptide
KAEEILSRSIVKRWANFAKYGNPNETQNNSTSWPVFKSTE

SEQ ID NO: 20231 - protein, 40 aa, Artificial sequence
  synthetic peptide
AEEILSRSIVKRWANFAKYGNPNETQNNSTSWPVFKSTEQ

SEQ ID NO: 20232 - protein, 40 aa, Artificial sequence
  synthetic peptide
EEILSRSIVKRWANFAKYGNPNETQNNSTSWPVFKSTEQK

SEQ ID NO: 20233 - protein, 40 aa, Artificial sequence
  synthetic peptide
EILSRSIVKRWANFAKYGNPNETQNNSTSWPVFKSTEQKY

SEQ ID NO: 20234 - protein, 40 aa, Artificial sequence
  synthetic peptide
ILSRSIVKRWANFAKYGNPNETQNNSTSWPVFKSTEQKYL

SEQ ID NO: 20235 - protein, 40 aa, Artificial sequence
  synthetic peptide
LSRSIVKRWANFAKYGNPNETQNNSTSWPVFKSTEQKYLT

SEQ ID NO: 20236 - protein, 40 aa, Artificial sequence
  synthetic peptide
SRSIVKRWANFAKYGNPNETQNNSTSWPVFKSTEQKYLTL

SEQ ID NO: 20237 - protein, 40 aa, Artificial sequence
  synthetic peptide
RSIVKRWANFAKYGNPNETQNNSTSWPVFKSTEQKYLTLN

SEQ ID NO: 20238 - protein, 40 aa, Artificial sequence
  synthetic peptide
SIVKRWANFAKYGNPNETQNNSTSWPVFKSTEQKYLTLNT

SEQ ID NO: 20239 - protein, 40 aa, Artificial sequence
  synthetic peptide
IVKRWANFAKYGNPNETQNNSTSWPVFKSTEQKYLTLNTE

SEQ ID NO: 20240 - protein, 40 aa, Artificial sequence
  synthetic peptide
VKRWANFAKYGNPNETQNNSTSWPVFKSTEQKYLTLNTES

SEQ ID NO: 20241 - protein, 40 aa, Artificial sequence
  synthetic peptide
KRWANFAKYGNPNETQNNSTSWPVFKSTEQKYLTLNTEST

SEQ ID NO: 20242 - protein, 40 aa, Artificial sequence
  synthetic peptide
RWANFAKYGNPNETQNNSTSWPVFKSTEQKYLTLNTESTR

SEQ ID NO: 20243 - protein, 40 aa, Artificial sequence
  synthetic peptide
WANFAKYGNPNETQNNSTSWPVFKSTEQKYLTLNTESTRI

SEQ ID NO: 20244 - protein, 40 aa, Artificial sequence
  synthetic peptide
ANFAKYGNPNETQNNSTSWPVFKSTEQKYLTLNTESTRIM

SEQ ID NO: 20245 - protein, 40 aa, Artificial sequence
  synthetic peptide
NFAKYGNPNETQNNSTSWPVFKSTEQKYLTLNTESTRIMT

SEQ ID NO: 20246 - protein, 40 aa, Artificial sequence
  synthetic peptide
FAKYGNPNETQNNSTSWPVFKSTEQKYLTLNTESTRIMTK

SEQ ID NO: 20247 - protein, 40 aa, Artificial sequence
  synthetic peptide
AKYGNPNETQNNSTSWPVFKSTEQKYLTLNTESTRIMTKL

SEQ ID NO: 20248 - protein, 40 aa, Artificial sequence
  synthetic peptide
KYGNPNETQNNSTSWPVFKSTEQKYLTLNTESTRIMTKLR

SEQ ID NO: 20249 - protein, 40 aa, Artificial sequence
  synthetic peptide
YGNPNETQNNSTSWPVFKSTEQKYLTLNTESTRIMTKLRA

SEQ ID NO: 20250 - protein, 40 aa, Artificial sequence
  synthetic peptide
GNPNETQNNSTSWPVFKSTEQKYLTLNTESTRIMTKLRAQ

SEQ ID NO: 20251 - protein, 40 aa, Artificial sequence
  synthetic peptide
NPNETQNNSTSWPVFKSTEQKYLTLNTESTRIMTKLRAQQ

SEQ ID NO: 20252 - protein, 40 aa, Artificial sequence
  synthetic peptide
PNETQNNSTSWPVFKSTEQKYLTLNTESTRIMTKLRAQQC

SEQ ID NO: 20253 - protein, 40 aa, Artificial sequence
  synthetic peptide
NETQNNSTSWPVFKSTEQKYLTLNTESTRIMTKLRAQQCR

SEQ ID NO: 20254 - protein, 40 aa, Artificial sequence
  synthetic peptide
ETQNNSTSWPVFKSTEQKYLTLNTESTRIMTKLRAQQCRF

SEQ ID NO: 20255 - protein, 40 aa, Artificial sequence
  synthetic peptide
TQNNSTSWPVFKSTEQKYLTLNTESTRIMTKLRAQQCRFW

SEQ ID NO: 20256 - protein, 40 aa, Artificial sequence
  synthetic peptide
QNNSTSWPVFKSTEQKYLTLNTESTRIMTKLRAQQCRFWT

SEQ ID NO: 20257 - protein, 40 aa, Artificial sequence
  synthetic peptide
NNSTSWPVFKSTEQKYLTLNTESTRIMTKLRAQQCRFWTS

SEQ ID NO: 20258 - protein, 40 aa, Artificial sequence
  synthetic peptide
NSTSWPVFKSTEQKYLTLNTESTRIMTKLRAQQCRFWTSF

SEQ ID NO: 20259 - protein, 40 aa, Artificial sequence
  synthetic peptide
STSWPVFKSTEQKYLTLNTESTRIMTKLRAQQCRFWTSFF

SEQ ID NO: 20260 - protein, 40 aa, Artificial sequence
  synthetic peptide
TSWPVFKSTEQKYLTLNTESTRIMTKLRAQQCRFWTSFFP

SEQ ID NO: 20261 - protein, 40 aa, Artificial sequence
  synthetic peptide
SWPVFKSTEQKYLTLNTESTRIMTKLRAQQCRFWTSFFPK

SEQ ID NO: 20262 - protein, 40 aa, Artificial sequence
  synthetic peptide
WPVFKSTEQKYLTLNTESTRIMTKLRAQQCRFWTSFFPKV

SEQ ID NO: 20263 - protein, 40 aa, Artificial sequence
  synthetic peptide
PVFKSTEQKYLTLNTESTRIMTKLRAQQCRFWTSFFPKVL

SEQ ID NO: 20264 - protein, 40 aa, Artificial sequence
  synthetic peptide
VFKSTEQKYLTLNTESTRIMTKLRAQQCRFWTSFFPKVLE

SEQ ID NO: 20265 - protein, 40 aa, Artificial sequence
  synthetic peptide
FKSTEQKYLTLNTESTRIMTKLRAQQCRFWTSFFPKVLEM

SEQ ID NO: 20266 - protein, 40 aa, Artificial sequence
  synthetic peptide
KSTEQKYLTLNTESTRIMTKLRAQQCRFWTSFFPKVLEMT

SEQ ID NO: 20267 - protein, 40 aa, Artificial sequence
  synthetic peptide
STEQKYLTLNTESTRIMTKLRAQQCRFWTSFFPKVLEMTG

SEQ ID NO: 20268 - protein, 40 aa, Artificial sequence
  synthetic peptide
TEQKYLTLNTESTRIMTKLRAQQCRFWTSFFPKVLEMTGN

SEQ ID NO: 20269 - protein, 40 aa, Artificial sequence
  synthetic peptide
EQKYLTLNTESTRIMTKLRAQQCRFWTSFFPKVLEMTGNI

SEQ ID NO: 20270 - protein, 40 aa, Artificial sequence
  synthetic peptide
QKYLTLNTESTRIMTKLRAQQCRFWTSFFPKVLEMTGNID

SEQ ID NO: 20271 - protein, 40 aa, Artificial sequence
  synthetic peptide
KYLTLNTESTRIMTKLRAQQCRFWTSFFPKVLEMTGNIDE

SEQ ID NO: 20272 - protein, 40 aa, Artificial sequence
  synthetic peptide
YLTLNTESTRIMTKLRAQQCRFWTSFFPKVLEMTGNIDEA

SEQ ID NO: 20273 - protein, 40 aa, Artificial sequence
  synthetic peptide
LTLNTESTRIMTKLRAQQCRFWTSFFPKVLEMTGNIDEAE

SEQ ID NO: 20274 - protein, 40 aa, Artificial sequence
  synthetic peptide
TLNTESTRIMTKLRAQQCRFWTSFFPKVLEMTGNIDEAEW

SEQ ID NO: 20275 - protein, 40 aa, Artificial sequence
  synthetic peptide
LNTESTRIMTKLRAQQCRFWTSFFPKVLEMTGNIDEAEWE

SEQ ID NO: 20276 - protein, 40 aa, Artificial sequence
  synthetic peptide
NTESTRIMTKLRAQQCRFWTSFFPKVLEMTGNIDEAEWEW

SEQ ID NO: 20277 - protein, 40 aa, Artificial sequence
  synthetic peptide
TESTRIMTKLRAQQCRFWTSFFPKVLEMTGNIDEAEWEWK

SEQ ID NO: 20278 - protein, 40 aa, Artificial sequence
  synthetic peptide
ESTRIMTKLRAQQCRFWTSFFPKVLEMTGNIDEAEWEWKA

SEQ ID NO: 20279 - protein, 40 aa, Artificial sequence
  synthetic peptide
STRIMTKLRAQQCRFWTSFFPKVLEMTGNIDEAEWEWKAG

SEQ ID NO: 20280 - protein, 40 aa, Artificial sequence
  synthetic peptide
TRIMTKLRAQQCRFWTSFFPKVLEMTGNIDEAEWEWKAGF

SEQ ID NO: 20281 - protein, 40 aa, Artificial sequence
  synthetic peptide
RIMTKLRAQQCRFWTSFFPKVLEMTGNIDEAEWEWKAGFH

SEQ ID NO: 20282 - protein, 40 aa, Artificial sequence
  synthetic peptide
IMTKLRAQQCRFWTSFFPKVLEMTGNIDEAEWEWKAGFHR

SEQ ID NO: 20283 - protein, 40 aa, Artificial sequence
  synthetic peptide
MTKLRAQQCRFWTSFFPKVLEMTGNIDEAEWEWKAGFHRW

SEQ ID NO: 20284 - protein, 40 aa, Artificial sequence
  synthetic peptide
TKLRAQQCRFWTSFFPKVLEMTGNIDEAEWEWKAGFHRWN

SEQ ID NO: 20285 - protein, 40 aa, Artificial sequence
  synthetic peptide
KLRAQQCRFWTSFFPKVLEMTGNIDEAEWEWKAGFHRWNN

SEQ ID NO: 20286 - protein, 40 aa, Artificial sequence
  synthetic peptide
LRAQQCRFWTSFFPKVLEMTGNIDEAEWEWKAGFHRWNNY

SEQ ID NO: 20287 - protein, 40 aa, Artificial sequence
  synthetic peptide
RAQQCRFWTSFFPKVLEMTGNIDEAEWEWKAGFHRWNNYM

SEQ ID NO: 20288 - protein, 40 aa, Artificial sequence
  synthetic peptide
AQQCRFWTSFFPKVLEMTGNIDEAEWEWKAGFHRWNNYMM

SEQ ID NO: 20289 - protein, 40 aa, Artificial sequence
  synthetic peptide
QQCRFWTSFFPKVLEMTGNIDEAEWEWKAGFHRWNNYMMD

SEQ ID NO: 20290 - protein, 40 aa, Artificial sequence
  synthetic peptide
QCRFWTSFFPKVLEMTGNIDEAEWEWKAGFHRWNNYMMDW

SEQ ID NO: 20291 - protein, 40 aa, Artificial sequence
  synthetic peptide
CRFWTSFFPKVLEMTGNIDEAEWEWKAGFHRWNNYMMDWK

SEQ ID NO: 20292 - protein, 40 aa, Artificial sequence
  synthetic peptide
RFWTSFFPKVLEMTGNIDEAEWEWKAGFHRWNNYMMDWKN

SEQ ID NO: 20293 - protein, 40 aa, Artificial sequence
  synthetic peptide
FWTSFFPKVLEMTGNIDEAEWEWKAGFHRWNNYMMDWKNQ

SEQ ID NO: 20294 - protein, 40 aa, Artificial sequence
  synthetic peptide
WTSFFPKVLEMTGNIDEAEWEWKAGFHRWNNYMMDWKNQF

SEQ ID NO: 20295 - protein, 40 aa, Artificial sequence
  synthetic peptide
TSFFPKVLEMTGNIDEAEWEWKAGFHRWNNYMMDWKNQFN

SEQ ID NO: 20296 - protein, 40 aa, Artificial sequence
  synthetic peptide
SFFPKVLEMTGNIDEAEWEWKAGFHRWNNYMMDWKNQFND

SEQ ID NO: 20297 - protein, 40 aa, Artificial sequence
  synthetic peptide
FFPKVLEMTGNIDEAEWEWKAGFHRWNNYMMDWKNQFNDY

SEQ ID NO: 20298 - protein, 40 aa, Artificial sequence
  synthetic peptide
FPKVLEMTGNIDEAEWEWKAGFHRWNNYMMDWKNQFNDYT

SEQ ID NO: 20299 - protein, 40 aa, Artificial sequence
  synthetic peptide
PKVLEMTGNIDEAEWEWKAGFHRWNNYMMDWKNQFNDYTS

SEQ ID NO: 20300 - protein, 40 aa, Artificial sequence
  synthetic peptide
KVLEMTGNIDEAEWEWKAGFHRWNNYMMDWKNQFNDYTSK

SEQ ID NO: 20301 - protein, 40 aa, Artificial sequence
  synthetic peptide
VLEMTGNIDEAEWEWKAGFHRWNNYMMDWKNQFNDYTSKK

SEQ ID NO: 20302 - protein, 40 aa, Artificial sequence
  synthetic peptide
LEMTGNIDEAEWEWKAGFHRWNNYMMDWKNQFNDYTSKKE

SEQ ID NO: 20303 - protein, 40 aa, Artificial sequence
  synthetic peptide
EMTGNIDEAEWEWKAGFHRWNNYMMDWKNQFNDYTSKKES

SEQ ID NO: 20304 - protein, 40 aa, Artificial sequence
  synthetic peptide
MTGNIDEAEWEWKAGFHRWNNYMMDWKNQFNDYTSKKESC

SEQ ID NO: 20305 - protein, 40 aa, Artificial sequence
  synthetic peptide
TGNIDEAEWEWKAGFHRWNNYMMDWKNQFNDYTSKKESCV

SEQ ID NO: 20306 - protein, 40 aa, Artificial sequence
  synthetic peptide
GNIDEAEWEWKAGFHRWNNYMMDWKNQFNDYTSKKESCVG

SEQ ID NO: 20307 - protein, 40 aa, Artificial sequence
  synthetic peptide
NIDEAEWEWKAGFHRWNNYMMDWKNQFNDYTSKKESCVGL

SEQ ID NO: 20308 - protein, 603 aa, Mus musculus
MQTQHTKVTQTHFLLWILLLCMPFGKSHTEEDFIITTKTGRVRGLSMPVLGGTVTAFLGIPYAQPPLGSLRFKKPQPLNKWPDIHNATQYANSCYQNIDQAFPGFQGSEMWNPNTNLSEDCLYLNVWIRVPKPKNATVMVWIYGGGFQTGTSSLPVYDGKFLARVERVIVVSMNYRVGALGFLAFPGNPDAPGNMGLFDQQLALQWVQRNIAAFGGNPKSITIFGESAGAASVSLHLLCPQSYPLFTRAILESGSSNAPWAVKHPEEARNRTLTLAKFTGCSKENEMEMIKCLRSKDPQEILRNERFVLPSDSILSINFGPTVDGDFLTDMPHTLLQLGKVKKAQILVGVNKDEGTAFLVYGAPGFSKDNDSLITRKEFQEGLNMYFPGVSRLGKEAVLFYYVDWLGEQSPEVYRDALDDVIGDYNIICPALEFTKKFAELENNAFFYFFEHRSSKLPWPEWMGVMHGYEIEFVFGLPLGRRVNYTRAEEIFSRSIMKTWANFAKYGHPNGTQGNSTMWPVFTSTEQKYLTLNTEKSKIYSKLRAPQCQFWRLFFPKVLEMTGDIDETEQEWKAGFHRWSNYMMDWQNQFNDYTSKKESCTAL

SEQ ID NO: 20309 - protein, 602 aa, Felis catus
MQSKGTIISIQFLLRFLLLWVLIGKSHTEEDIIITTKNGKVRGMNLPVLDGTVTAFLGIPYAQPPLGRLRFKKPQFLTKWSDIWNATKYANSCYQNADQSFPGFPGSEMWNPNTDLSEDCLYLNVWIPTPKPKNATVMIWIYGGGFQTGTSSLPVYDGKFLARVERVIVVSMNYRVGALGFLALPGNPEVPGNMGLFDQQLALQWVQKNIAAFGGNPKSVTLFGESAGAGSVSLHLLSPRSQPLFTRAILQSGSSNAPWAVMSLDEAKNRTLTLAKFIGCSKENDTEIIKCLRNKDPQEILLNELLVVPSDTLLSVNFGPVVDGDFLTDMPDTLLQLGQFKKTQILVGVNKDEGTAFLVYGAPGFSKDNDSIITRKEFQEGLKIYFPGVSEFGREAILFYYVDLLDDQRAEKYREALDDVLGDYNIICPALEFTTKFSELGNNAFFYYFEHRSSQLPWPEWMGVMHGYEIEFVFGLPLERRVNYTRAEEILSRSIMNYWANFAKYGNPNGTQNNSTRWPAFRSTDQKYLTLNAESPKVYTKLRAQQCRFWTLFFPKVLEMTGNIDEAEREWRAGFYRWNNYMMDWKNQFNDYTSKKESCAGL

SEQ ID NO: 20310 - protein, 602 aa, Panthera tigris
MQSKGTIISIQFLLRFLLLWVLIGKSHTEEDIIITTKNGKVRGMNLPVLDGTVTAFLGIPYAQPPLGRLRFKKPQFLTKWSDIWNATKHANSCYQNADQSFPGFPGSEMWNPNTDLSEDCLYLNVWSPTPKPKNATVMIWIYGGGFQTGTSSLPVYDGKFLARVERVIVVSMNYRVGALGFLALPGNPEIPGNMGLFDQQLALQWVQKNIAAFGGNPKSVTLFGESAGAGSVSLHLLSPRSQPLFTRAILQSGSSNAPWAVMSLDEAKNRTLTLAKFIGCSKENDTEIIKCLRNKDPQEILLNELLVVPSDTLLSVNFGPVVDGDFLTDMPDTLLQLGQFKKTQILVGVNKDEGTAFLVYGAPGFSKDNDSIITRKEFQEGLKIYFPGVSEFGREAILFYYVDLLDDQRAEKYREALDDVLGDYNIICPALEFTTKFSELGNNAFFYYFEHRSSQLPWPEWMGVMHGYEIEFVFGLPLERRVNYTRAEEILSRSIMNYWANFAKYGNPNGTQNNSTRWPAFRSTDQKYLTLNAESPKVYTKLRAQQCRFWTLFFPKVLEMTGNIDEAEREWRAGFYRWNNYMMDWKNQFNDYTSKKESCAGL

SEQ ID NO: 20311 - protein, 141 aa, Ovis aries
NTDQSFPGFLGSEMWNPNTDLSEDCLYLNVWIPTPKPKNATVMIWIYGGSFQTGTSSLHVYDGKFLARVERVIVVSMNYRVGALGFLALPGNPEAPGNVGLFDQQLALQWVQKNIAAFGGNPKSVTLFGESAGAASVSLHL

SEQ ID NO: 20312 - protein, 141 aa, Sus scrofa
NTDQSFPGFVGSEMWNPNTELSEDCLYLNVWIPAPKPKNATVMIWIYGGGFQTGTSSLHVYDGKFLSRVERVIVVSMNYRVGALGFLALPGNPEAPGNMGLFDQQLALQWVQKNIAAFGGNPKSVTLFGESAGAVSVSLHL

SEQ ID NO: 20313 - protein, 141 aa, Macaca mulatta
NIDQSFPGFHGSEMWNPNTDLSEDCLYLNVWIPAPKPKNATVLIWIYGGGFQTGTSSLHVYDGKFLARVERVIVVSMNYRVGALGFLALPGNPEAPGNMGLFDQQLALQWVQKNIAAFGGNPKSVTLFGESAGAASVSLHL

SEQ ID NO: 20314 - protein, 141 aa, Canis familiaris
NTDQSFPGFPGSEMWNPNTDLSEDCLYLNVWIPTPKPKNATVMIWIYGGGFQTGTSSLPVYDGKFLARVERVIVVSVNYRVGALGFLALPGNPEAPGNLGLFDQQLALQWVQKNIAAFGGNPKSVTLFGESAGAGSVGLHL

SEQ ID NO: 20315 - protein, 141 aa, Bos taurus; identical to SEQ ID NO: 20311

SEQ ID NO: 20316 - protein, 581 aa, Oryctolagus cuniculus
MVTRSSHTEDVIITTKNGRIRGINLPVFGGTVTAFLGIPYAQPPLGRLRFKKPQSLTKWSDIWNATKYANSCCQNIDQSFPGFHGSEMWNPNTDLSEDCLYLNVWIPTPKPKNATVMIWIYGGGFQTGTSSLQVYDGKFLTRVERVIVVSMNYRVGALGFLALPGNPEAPGNMGLFDQQLALQWVQKNIAAFGGNPKSVTLFGESAGAASVSLHLLSPRSHPLFTRAILQSGSSNAPWEVMSLHEARNRTLTLAKFVGCSTENETEIIKCLRNKDAQEILLNEVFVVPFDSLLSVNFGPTVDGDFLTDMPDTLLQLGQLKKTQILVGVNKDEGTAFLVYGAPGFSKDNTSIITRKEFQEGLKIFFPGVSEFGKESILFHYTDWVDEQRPENYREALDDVVGDYNFICPALEFTKKFSEWGNNAFFYYFEHRSSKLPWPEWMGVMHGYEIEFVFGLPLERRVNYTKAEEILSRSIMKRWANFAKYGNPNGTQNNSTRWPVFKSTEQKYLTLNTESPRIYTKLRAQQCRFWTLFFPKVLEMTGNIDEAEQEWKAGFHRWNNYMMAWKNHFNDYTSKKERCAGF

SEQ ID NO: 20317 - protein, 574 aa, Equus caballus
EEDIIITTKNGKVRGMNLPVLGGTVTAFLGIPYAQPPLGRLRFKKPQSLTKWSNIWNATKYANSCYQNTDQSFPGFLGSEMWNPNTELSEDCLYLNVWIPAPKPKNATVMIWIYGGGFQTGTSSLPVYDGKFLARVERVIVVSMNYRVGALGFLALSENPEAPGNMGLFDQQLALQWVQKNIAAFGGNPRSVTLFGESAGAASVSLHLLSPRSQPLFTRAILQSGSSNAPWAVTSLYEARNRTLTLAKRMGCSRDNETEMIKCLRDKDPQEILLNEVFVVPYDTLLSVNFGPTVDGDFLTDMPDTLLQLGQFKRTQILVGVNKDEGTAFLVYGAPGFSKDNNSIITRKEFQEGLKIFFPRVSEFGRESILFHYMDWLDDQRAENYREALDDVVGDYNIICPALEFTRKFSELGNDAFFYYFEHRSTKLPWPEWMGVMHGYEIEFVFGLPLERRVNYTRAEEILSRSIMKRWANFAKYGNPNGTQNNSTRWPVFKSTEQKYLTLNTESPKVYTKLRAQQCRFWTLFFPKVLELTGNIDEAEREWKAGFHRWNNYMMDWKNQFNDYTSKKESCSDF

SEQ ID NO: 20318 - protein, 603 aa, Gallus gallus
MVWANGMSICARFLMWLLLLFMFIRKVVPEDNVITTEKGRVRGTNLQVLGGTVTAFLGIPYGKPPIGRLRFQKPEPFEKWSGIWKATKHANSCYQLIDTTYPGFPGTEMWNPKTNLSEDCLYLNVWIPSPKPKNATVMVWIYGGSFETGSTSLPVYDGKFLARVERVIVVSMNYRTGALGFLALPGNKEVPGNAGLFDQRLALQWVQENIASFGGNPKSVTIFGESAGSASVSYHILSPKSHPLFTRAIMQSGSANAPWAAITASEARRRTVALAKQLKCPTSDETELILCLQDKDPKDILENEVYVVKYFSLLHIYFCPTVDGDFLADMPEALIKNGIFKQTQVLVGVNKDEGTSFLVYGVPGFSKDSDSLINKTQFEVALTLSFPQVSKLAIESIIFQYTDWENEQKPEHYRDAMDDVIGDYHIICPAVEFAKTIAEVGNNVFFYFFEHRSSKLPWPEWMGVMHGYEIEFVFGLPLERRVNYTKAEEILSRSMLRYWASFAKTGNPNGTLINGTRWPVFTSTEQKYLTLNTDASEILTKLRAQQCRFWNMFFPKVLEMTGNIDEAEREWKAGFHRWNNYMMDWKNQFNDYTSKKERCAGSN
